United States Patent Application Publication US 2022/0008368 A1 - sequence listing, part 22

SEQ ID NO: 2 - DNA, 58617616 bp, Homo sapiens (residues 45,591,484-47,762,506 of 58,617,616)
  modified_base (1)..(60000): a, c, t, g, unknown or other
  modified_base (24448981)..(24498980): a, c, t, g, unknown or other
  modified_base (24552653)..(24552752): a, c, t, g, unknown or other
  modified_base (24891257)..(24891356): a, c, t, g, unknown or other
  modified_base (24895791)..(24895890): a, c, t, g, unknown or other
  modified_base (24898314)..(24904771): a, c, t, g, unknown or other
  modified_base (24908590)..(24908689): a, c, t, g, unknown or other
  modified_base (27190875)..(27240874): a, c, t, g, unknown or other
  modified_base (58607617)..(58617616): a, c, t, g, unknown or other
aggcgggcgaagcggagtgggtgggccacagccaggtagcggtccaccgagatgcagcacaggaaggcgatgctgatgtagatattggtgtagaagatgaacccaaagagcttgcaggacccggggccgtggatccagttgtcgtggtgcaggaagtagtccacccacagcggcagcgtgcagatgtacagcaggtcggcgatgctgaggttcatcaggtagacgcccagctcgttgcgctgttgcacctggcggtaggccgcccacagagccaggcagttggtgggcagccccacgccgatgacaaagatgtagagggatggcggaaagaggtggtccacgcgcgagtccacgtggcagccctcccacgtgtggttgcccatggtgggcacttcggcttctggggcgcttcccctggcccacgggggctgtggggccacagggagcgggaggccatggggccccctgagccccttccttggaggctcaggggaacatggtgggatgtggtctacagggaagagatgaggttgggtaggctgggctgggctgggaagggcagagcttgagagggaaaagttggaggagggatggaattatgacaggagggaagtctggaggatggtgagattaataaagaggtttttcaaggaggttatgtatggagtcagtgtgtcaacgagggagtatgggggtgacacaaaaattggtctccgggagtgtttatggaggagacgaaagcatcgctgggcaatggtgagaaggagatggtttgcagggcaattaggaagtatgtgtagccatattgaagtaataatggcgggggaatgttctagaagacacaagaaatacatgagaaagtgttgagataggacacagcgcagttagggagtgttggaaagttcaggcaatgtgggtgggagtgctggcatttcctaggaccccagaaagcaacagagataagtaaggtcaccagtaaggagaaggttctggaaaaggaggtgtctggcacagggtggacaaagataaaaggctcggtctgtggacggcaggaaggagtcttaggaaacaggaaggaggtgagtaaggtctagatcagaggtaagtttggggacggaagggaaatttcaatgggggcaggggagggactccagactggtcctggtgggggctgagggattgggatgaagtcagttcaccgctgactgcagtgcctgttgggagagaggacagcagtgagggagtcatggacactccaaccttcttctccccacactcctcaccataattgctgtgaactgcagagactggacaccccaacaatgcctacttcagccccatcctaagcaaccactctctgaaaacacagatttgaggtgtcaggcatattttcccctgacagatattagaataaagacccaactcaggccgggtgcagtggctcatgcctgtaatctcaacactttgggaggccgaggtgggaggttcgcttgagcctaggagttcaagaccagcctgggcaatgcagtgagacccagtctctacaaaaaataaaaataaaaatattagccaggtgtggtggtacatacctgtagtcacagctactggggaggctgaggtaggaggatcacttgatcccaggggattcaggctgtagtgagctataatcacaccacggcactccagcttgggcaacagagtgagaccctgtctcaaaaaaaaaaaaaaaaaaaaaggtagggtgtggtggctcgcacctgtaatcccagaactttgggaggccgaggcaggcagatcacgaggtcaggagttcaagaacagcctggccaacatggtgaaaccccatctctactaaaaatacaaaaattagctggatgtggtggcacgtgcctgtaatcccagctacacaggaggctgaggcaggagaattgcttgaaaccaaaaggcggaggttgcagtgagctgagatcgcaccactgcactccagcctgggcaaaagagtaaaactctgtctcaaaaaaaaaagaagaaaagaaaaaaaagaaaaaaaaaaggaaagaaagaaagagaaaaagggaaaaaaatgacccaactcagattttagcattttcctgcagaattcctgtaaaactggcacaggtatcatatcatgcttcaggaaatgccagactagtctaactctatcatgtcacagacagggagaaggggcccagagaggctgagtcacctccctaaggatgcacagcatggcagcaatagggccagggctggggccagcctcccactccttacccaagaatcccattcttgtcaacaaggataataacagcaaacgttaattgagccctactacatagcagatcccattccaggcatttttatgcatattatttctttttatttatttattttttgagacagggtcttgctcttttgtccagactagaatgcagtagcacgatcacagctcacagcagcctcaacctcctgggcttccagtgatcctcctgcctcagcctcccaagtagctgggaacacaggcatgcaccaccatgcctggcttaaaaaaaaaaaaaaaaaatatatatatatatatatatatatatatataaaatagatgcaggtcttcctgtgttgcccaggctggtctcttgaactcctgagctcaagagatccttccctgtaatcgcagcactttgggaggctgaggcgggcggatcatgaggtcaagagatcaaaaccatcctggccaaaatggtgaaaccctgtctctactaaaaatacaaaaattagctgggcatggtggcgcacacctgtagtcccagctactcaggaggctgaggcaggataatcgcttgaacctgggaggcgaaggttgcagtgagctgagatcacgccattgcactccagcgggggtgacagagccagactccgtctcaaaaaaaaaaaaaaaaaaaaagagatcctcccaccttggcctcccaaaatgctaggattataggagtgagccaccatgcccggccaatttatggatattacttctttgaaattttcaagactcctatgaggaaagtagttgttctttctctttgacaaactgaggcacagagctgttccaagacctgtccaaggtcctgatgtctagagtgcagccatctctgctctcagtcctcatctccagcctgtgcttcagtttccaccccagaataactggacaggccaggcacagtggctcatgcctgtaatcccagcactttgggaggccaaggcgggaggatcgcctgaggtcaggagttcaagatcagcctggccaacatggtgaaaccctgtctctactaaaaatacaaaaattagctgggcgtggtggcacatacctgtaatcccagctactcgggatgctgaggcgagaggattgcttgagcccaggaggcagaggttgcagtgagctgagatagcatcactgcactccagcctgggagacaagagaggaactccatctcaaaaaaaagaagtccaggcacggtggctcacgcctgtaatcccagcactttgggaggccaaggcgggaggatcacctgaggtcgggagttcgagaccagcctgaccaacatggagaagccctgtctctactaaaaatacaaaataagctaggtgtggcggcacatgcctgtaatcccagctacttgggaggctgaggtgggagaattgcttgaacccgggaggcagaggttgcagtgagctgagatggtgccattgcactacagcctgggcaacaagagcgaactccatctctaaataaataaataaataaataaataaataaataaataaataaaaaataactggacagaaaagggccctgggctgccagtggggactgggaaccaaagctgcagaggagtaagggaaaggggagagccaggagctgctgggaacagtcaaggtcaagatcaagatcagggagcatggggaagccctggggttagcgccagcagtctcctccctcagggaccactctcttcactgtctctgccctttcccccgcaattttcctgagtgagaaccttgagcctgtcacccactttgttctgggaagatctgcatacacagggcaaaggatattcatggaccaagcccctgactatcatcaaccccgcagagaagcagagccaagtccagagtcacaggcagcttcaggagccattccatccaggggtcttttggtttagttcttttggacgtgaaacctggctttttttttttttcccccaacaagatcttaaccagaaaccaatctaaaacagtgaaaagggtgagctgctagctgctctggtgaaacaaggtgggggtggagaggccacctctgaagaatccccaggatgcacttttaaaacatgttaaaaatggagtttaaggtggagtctattgacaaatgaggaaaccaatccccagagaggggacggaaggaggtccatgggagcctcccagatgccagagcatctttccatgggaaagtcctctgggctccacctccccagtgcttcctgaatctgtgtgcgtctctctcaaacgcctgccactgtccactctgcgtcagcatcagcgtcatcactcgctgggatcattgcagtagcatcaccattgcttttctgggctactctggcttccttcaaatcacttcccatatggcagccagaaagatctttcttttcttttcttctttttttttttttttttgagatggagagtttcactcttgtcacctaggctggagtgcaatgtcccaatcttggctcaccacaacctctacctcccgggttcaagtgattctcctgcctcttcctctggagtagctgggattacaggcatgcgtcaccacgctcagctaattttgtatttttagtagagacagggtttctccatgttggtgaggctggtctcgaactcctgacctcaggtgatccacccaccttggcctcccaaagtgctgggattacaggcgtgagccaccgcgcccgggcaagatctttctatcatgaaaatcagctctttcttttcttcttttcttttctttctttctttcttttttttgagacagggtctcactctgtcatgcagtagtgcaatcttgactcactgcagtcttgacctcatgggctcaagccatcctcccacctcagcctcgtaagtggctgggactacaggtgtgtgccaccacacctggctaatcgttctattttttgtggagatggggtttccccatgttgcccaggccggtctccaactcctgggctcaaaagatcttcctgccttggcctcccaaagtgctgggattacaggcatgagccaccacatgcagcctagttcttgttacttccctgcttgaaaccctccaatggcttctgaatggacttgcggtaaaatccagactcctcatccggagtcacaaggttctgtctgacctgctggggcagcctagccaatctcactcacctctccttcctgcctcagcagtctcaaggccagtgagtgaccttctttccagcctcaaacctttgcacacttaccatactctcagtctggaatgctcttttttttttttggagacagaatcttactctgtcgcccaggctggagtgcagtggcacgatctcggctcactgaaacctccgccacctgggttcaagtgagtctcctgccttggcttcctgagtagttgggattacaggtgtgcaccaccatgcccagctaatttttgtatttttagtagagatggggttttaccatgttggccaggttggtctcgaactcctgttctccagtgatccacccaccttggcctctcaaagtgctgggattacagatgtgagccactgctcttccttcagatagtctgagtagctccgttccctccttcacttcctcgggagtccctctccattcagtccccgactctcccctgccccaggaccctctcctcacatcaccctgttttgtttgtgtctgtctgcctagaataggttgtccaggagggcagagactttgtgtgccttgttgactgctgtatccccagcatccaggacaggcccagcatacagtaggtgctcaataaattaccaaggtcatggtcagggagcacagagccatttgccaatggcaaaaaccattccagaagctttgcagaggccagaggcatggagtaaaaacatactctctgcccatgaggctgccccaccccaccccaggctcaaacaagggcatggggaggagggggaagggagggagaggagtccattcccaggggaagaggtggtcaggggagagctggaaagggcaagatctatccgcttcttaattgactttgaaaggtcagggctgagtcgtgctcagtaagtcctgccccctgtggggtcctcagcggcagagctgcctcccccaccccagactcttgggcagaagcttgtgggtcctgtggagatgggatgggtgggggcgtactccaggctggaacagtgtgatccagtccctcccttccacttgaaacctcccacccagaccaagtcactcaaaataacctccctcccctctcctctgccctctctctccccatctctctgcccctagtctctcccttcctcctgtgacatttagagaattaggtctccaggagcctcagtttctcccttctgtaaaagggggcacaggctttatagtcatcacatcacagaccggaacgtccttgctagaatgcgatatcagctccgtaacatgcagtatttgaacgattattattattccacggggactagggggctgagacaagaaataaaccggttcttcatggcaggagacacccaccgagggctagaagtcccctttgccccactttctatcgacccccagggctctgctgacctaactcgggtacccgggcaggagacacttccggcagccagaggaggaaatacacttcccattgctaatttcctcaagggggaaccggtccagctctcacccctcctccctcccacccctcctccccaacctgctggcatcttgcggatgctggacatgggggggaggggtgcccagacagccctctcttcttccccacgtgagatctgcccaacgtggaaaccccaaaagtcagcatggaacgtcagactcttagaacgccacagtgcagccgacgtatgtgtggcagctgggagtgtgaggctatttctgaccccttcctggtacagatggggaaaccgaggcccgcagcagcaaggcagttgtctaagtcacttgatgtctcaagactgggcaaacctcctgtcgctgttaactaaacagcttcccttcccctgaggtttttctcttcactctctgaacttctgtaatttttctcaagtctttctgagcgtctctggcccctctgagaacctactagaagatacgaccttctccccacaaagaaagcaagcgaccttccatcacctgatccccataaccccgttccccttccaggaccctctctggttgggatctaagttctgccccttaggctctgttgagggggtaaacccccaaatctcacatccacaagaagctccccctgtctgtcccacaggcccccacttcttgggtccctgctggccccttccagagagtcggggggaagagaaatatacccaaggatggagagatggtggggggacaggaaagactaggaagacctggcccccccaactttagcagcctcggctgccgcatcctgccagccaccccaaaatccagcaaagctgaaaaacttggaggattttgaggacaagagggagaagtgctacagccccccgcatcccccagcacccctgggctcactcaccagccttgtccccgatgccaccaggctatctcacctcccccttttcctcctctgtgggctcctgctcccaccacccccccctccccgccttctccctgcagccccaagggaccagccagctccggtctgctcattagggacgaaatgtgatcactggtcctcgctccccacctggtgccctggcggccggcggaaaccagggggcaatcgggctaccctaacggccccactgcacctcagtatccctgtttcaaccgagagggtctctgtgcccccaaagcccacactgcctactagggataccagtccttagatggcctctctgacgttctaggtctctatggttctgcagtcttcaggttctatccttagttcacttcgcagttgaatgttctattataacattctagagcgttactcttctttcattctatttattacatcgtggctttgtaagtacctaccctaagtttccaatattctaggagtgtcacattccaagattcgaaagttctattgttagaacacgctatgatttttttaagcattctatgactttcataatctattattaaacgctcagtgatttttatctttccccagcaaacaggaatatgtatttcccttttctcttttacagaaatgggaacatacactaaatacggtgagccccacttccttttctttccccccttctctcgcctgcttttgaacattccagcagcctgatttctaagattgtgcagaattctaagaaattatggcttcatggagggaagagaggggcgtgttagtcaccacctccacctggcccctaaattctcaccacctgggggtgacatgctatatccaggccgcctctctaccctttcgctagtgggcctagcctcagccctccccgctcacaccagctgagttattatttgtctagacacaaaccaaattataggccctgtccccgagggaacggtgggctccaggcggagggtcaggagactgaagctggagttaatcccggttcccctccacctccctccctctcttcccgaaactccaccccttccacccaaaccaactattgcccctctccctccccaccaccatggttttggaaatattttctctcctctgcttctaaaaccctcccttctggattccagccatttctactcaccctggcatctctccctcctcattgagaagacctctttccccaaattaatccgacttagtggtagcagaagaagccagctctgtggatttgggcttcagttgaaaactggggtcccaaccctccagcctggcactgactcactgtggggacttctgcttttggacctcagtttctccatctataaaatgggggcagggggagttggcctaggtggctccgcaaaccctttccagctctcagctgccatcactgaaacgtgccaagatttcaacactcctctttttggattgaaggactccagtatccccaggacctttgattggaaagatctggaattcccaggcctcccctccaatgcttcttccatctgggcccttccattcaaagatgttcacattcaaggtacttgatcataggattcccagggttccaggagcccctatgggtctttcatcctcttcagctgggattcccccagaaaagaaaacctcctcatcctcaccccaaacctgaagtcaagttcatctacaaagacagaggtgggggcggatacccccttggtgggctcaggaggaggggggctgatggtgggctctggagggggaactggggggtgtggccccatcctctccacttctgcgccaaacaaattccccaatgcatatccagcctgagtacgcacacacacacatcccacaaccgatgcctcacagatatcctagagctattcctcagcctagtttgggaggaggggttgtccagttccaggggggagagtgaggcggaagcaggaaagagttaatggtgacccagccaaatcctggaagagaggaagtaggggaggaagtccaccccccaggcaggaattcctgaaattggcgggcgggctgggtgcgacctgaggggcagtggggtggctccgtgaagggggcgctgggatcatggtgtcacttagagtccgcctgccccaggtcacaagcctcctgccccctaccccactcccaagcaggttcccagcccagaggaaagttccgggatgcggaggatttggaaggagagaagacagagctgaaggtgccaaaacagtgttataagagacggagagaaagagacagggcaatagagatgaagagacaggaagggagagagcaaagagatacacagagacagggagagatggagatagagtcagagacatccgcagaggtcccacaacagacgggggtgaggcagaggcaggggcagagggaggtgggacccagaaacagagagacagagacagacagacggagacagagaggcagagatcaagaaaaagacagagacatccagagacacagaaggaaagacacgtccagaggcagagggaccacagacacagagacatcaggcgggagttggagacagacgcaaagccagggagagcaacagagggggcgggcaccgagacggcgcgggagactgaggcagcccccgagggggcggggaggagcggtctcgccacgagcagggcaacctagtgagaccccgcagcatcgcgggcagccggggaggacccggcacttacctgcgcgcggcgactggacggggcgggcggcggcacctctctccgctgcgtccaggtccccggtcttgacaacggcgcggggacccagcggatgcccccgcggggcagaacagcggctactcctcccggcccccgggccagagccgccagccgaggccccgccccggccaggcccgcccccattaaccccacctttgccgctgccccttaacccctttcaggcttcaccccattaaacgcctccagccacgggtgaggctcatctgctactggaacacccccgaatccttccaagtccccagctggaaggtcccctctctccaaccacacacccccaaatttatcaggtcctcggctatgggaagaggaggcccccgctactgaccttccctgggttaagccatttcctcccttagagaccccaggcttcagtcattcatcctctggtcattaaccttctgcatcttcctccccaacaacggagagaataaagggttctgttaggtccccaactccaaagtcagggccacccctagaaggagctctggggttgcatttccagcctgactcttggtcagaccttaggctagtgacatctccgtgcctcagtttcctctttgaatcaaggtggtcactcatggtgcctgcttgcttccttcttttctttgctttgctttgctttgcttttttctttcttttctttcgagacagagtcatgctctgttgcccagactggagtgcagtggcacaatcttggctcactgcaatctctgccttccaggttcaagcgattctcctgcctcagcctcccgagtagctgggattacaggcacacaccaccacgcccggctaatttttgtatttttaatagagacggggtttcaccaagttggccaggctggtctcgaactcctaagctccagctatctgcccacctcggcctccaaaaagtgttgggattacaggcgtgagccaccgtgccccaccttttttctttttttgagacaggttttcactctcttgcccagtctggagttcagtggcacgatcatggctccctgcggcctcaaccttccaggctcaagtgatcctcccacctcagcctcctgagttgctgggactacaggcgtgtgccaccacacctggccaatttaaaaaattttttttttctatagacaggggtctcactatgttgtctaggctggtctcaaactcctgggctcaagccatccttctgctttggcctcccaaagtgctgggattataagcctgagccaccgaggccggccatcatggtccttttctcctggcggtctcatttaatggtgtcaatgctatcaagtctgtaaaatatgccaaccagaccccaacactccccatctttctctgcctcacttttcccctaccctttggggaaggcaacattctcttatttttttctagttgtctgccttcctactaggaagagtgtcatttttgtgtctggcttgtttactgttgcatgtctgttgcctagaagactgctgggcaggtgataggtgtgaaacacattgttttctggccgagcgtggtggctcacgcctgtaatcccagcactttgggaggctgaggcaggcggatcacgaggtcaggagatggagaccatcctggctaacacagtgaaaccccatctctactaaaaatacaaaaaaattagccagatgtgatggtgggcgcctgttgtcccagctaatcaggaggctgaggcaggagaacggcatgaacccgggaggcggagcttgcagtgagccaagaccgcgccactgcactccagcctgggtgacagagcaagactccatctcaaaacaaaaaacaaaaaacattgttttcagggagtgaacaaatgaatgataagtgctcctaaaacattagcttatttttattattaacatcacatctttcataaactaatcatgagaattcattattggtcaagggacttcagatagatgtggcatataacactaaaaaatgatagctgtcaggtttgatttttttttttttttttgagacagagtcttgctgtgcccaggctggagtgcagggacatgatctcagctcaatacaacctcctcctgccgggtacaagcaattctcctgtctcagcctctggtagctgggtatacaggcatgcaccaccacacccagctaatttttttgtttttagtagagacagggtttcaccatgttggccaggctggtctcgaactcctgacctcaggtcatctgcctgccacggcctcccaaagtgctgggattacaggcatgagccacggcacctggcttgttttttgtttttttgagacagagtcttgctctgtcccccaggctggagtgccattgtgccatctcagttaactgcaacctccacctcccaggttcaagtgattatcctgcctcagcctcccgagtagctgggactacaggtgaacaccaccacacccggctactttttgtgtttttagtagagacaggttttcaccatgttggccaggctggtctcgaactcctgacctcaggtgatcagcctgcctaggtctcccaaagtgctgggattataggcatcagccatcgcgcccagctcttttgtgtttatttttaaattaaattaaaatgtaggccaggcatggtggttcatgcctgtaatcccatcactttaggaggccaaggcaggttgatcaattgaagccaggagtttgagatcaacctgggcaacatagcaagactctgtctctacaaaaaaaaaatttcttttaactagccagctgggtggtgcgtgcctgtggtcccagctactgcgcaggccaaggtgggaggatcacctgaacccaggaggcggaggttgcagtgcgccaagatcgcaccactgcactacagcctgggaaacagagggggaagaaagggcacctaagctctgtggctcatgcctgtaatcccagcactttgggaggctgaggcgggaggatcactcgagcccaggagtttgagaccagcctggacaaaaaagtgagacccccatctctacaaaaaaaaataaaaaataaaaattagccgtgattaaaaaataaatgtaattaaaaattacatttaattaacaattagtctcaaaaaatttgattaaaatgttcagatcttaagggaagaatataaggaatcctgaaaattggatacaccatgtaattaaacacccaaatcaagactcaggatatcggccaggtgcggtgtctcacacctgtaatcccagcactttgggaggctgaggtgggcagatcacttgaggtgaggagttcaagaccagactggccaacatggcgaaatcccgtctctactaaaaatacaaaaattagttgggtgtgatggtggatgtctgtaatcccagctactcggaaggctgaggcaggataattgcttgaacccaggaggtggaggttgcagtgagccgagattgcgccattgcactctagcctgggcgacagagcaagactccatctcaaaaaataaataaatagtgcaggtgcactggatcatgcctgtaatcccaacactttgggaggccaaggcaggcggatcacctgaggtcaagagttcaagactagcctgaccaacatgaagaaaccctgtctctactaaaaatacaaaattagccgggcgtggtgacacatgcctgtaaacacagctactcgggaggctgaggcagaagaatcacttgaacccaggaggtggaggttgcagtgacccaagatcgtgccattgcactctagtctgggcaacaagagcgaaactctgtctcaaaaataaataaattaattaattaataaaacaaacaaaaacatagctattcttataatcttgtgtggctttggacaggtgactttacctctgtgaaccacattacccccttcctctcagggatttttcttttaagagatggggtctcactcttttgtccaggctggagtacagtggctccatcataactcactgcagcctctacctctggggctcaagcaatcctcccgcctcagcctcccaaagcactgagattaccagagccaccaaacccagccaaagtgagcaggttaacgaagactcaagagaccaacaacactcataggaataaatgtttttttttttttttttttttttttttgagacagagtctcgctctgtcgccctggctggagtgcaatggtgcgatcttggctcactgcaagctccgcctcccaggttcacgccattctcctgcctcagcctcccgagtagctgggactacaggcgcccgccaccgcgcccagctaattttttgtattttttagtagagacagggtttcactgtgttctagatctcctgacctcgtaatccgctctcctcggcctcccaaagggctgggattacaggcgtgagccaccacgccaggccaggaataaatgtttttttccttcaggccgggcacagtggctcacgcctgtaatcccagccctttgggaggccgaggcaggtggattgcttgaggccaggagttcaagaccagcctggccaacatggcaaaaccccatctctactaaaaatacaaaaattagctgggcatggtagcgcacacctgcagccctagctactcgagaggctaagacatgagaatcgcttgagcctggcaggcagaggttgcagtgagctgggattgtgccactgcactccagcctgggcaacacagtgagactgactcaaaaactaataataataaaaagataaattctgaatgctcattggtgggcttagagtccccttctctctctggctcatcctaaatttatgctgagactcgatcagggtcctggagggaagcaagtggccactccgagtttaactgggagcatttatgggcagtttatagagggatgggcagagtggagaaagccacaaaggatggggcggccccaggggaccatccgaagtgggcacgaagccatcgccagcctagggcagaagggacagggagggagtctgttacccgtctccagggacagctcgagttcccagaggaactgcggctcagaggaggggaaccacagccactgtgagtgcgggatgcagggaggggcccaggaagcaaataccctgacctctctccaccgaccctgccgatagaatttgcacacggcggtctcccagggccccgagctggggaaggaaggctgagagtgaccctgggggcgcggaggagggtcacgtggagaatcaccagcacttttccagcagaactttcttggcacatttttccatgcaggtccaagactggccacgaggggtcgaaagagcacccggatgcccgatgaaagggccgcttccgcagcgctgggccactttcccagaacctgggcaatggggaagggacaaaaggtggggagtgaggggaggaggagaggaggctttgacccaagagcggcagaaaactgtcttctagacctaagggtgataggataggcctagtgcaaactccatccacagggtcggtggagagagtcagggtacactcacttcctgggcccctttctgcttcccttagtcccacagtggctgtggccccctcctctgaaccacagctcctctgggaactctgcctgtccctggagacgggtaacaaattccctccctgtcccttctgccctaagggtggtgatggcttgggtctcactggtctcctatctccagcataggtctggtcactgctggctgatgaggagttcgcccgtggacaagttcagaaagggagggttcaaatggctggcacctaagacaatgtgactgtagagggtgctggcttttaaaaaagtgaaggatcagccccggtgtggtggctcatgcctgtattcccagcactctgggaggctgaggcaggcagatcacctgaggtcaggagttcgagaccaacctggccaacatggcgaaactctttattaaaaaatacaggctgggcgcagtgggtcatgcttgtaatcccaacactttgggaggctgaggcgggcggatcacgaggtcaggagactgagaccattctacctaacacagtgaaaccccatctaaaaataccaaaaaaattagccgggcatggtggcaggtgcctgtagtctgagctactcgagaggctgaggcaggagaatggcatgaacccaggaggcggacctttcagtgagccgagatcgcaccagtgcactccagcctgggcgacagagtgagactccgtctaaaaaagaaaaaagaaaaaaaaatgcaaaaagtagccaggtgttgtggcatgcacctgcattcccagctactcaggaggctgaggcaggagaatcgcttaaacccgggaggcagaggtggcagtgaaccaagatcatggcactgcacccagcctgggcgacagagcgagacaccatctcaaataaaaaaaaaattttattttaatttttttgagacagagtctcactctgtcacccagactggagtgcagtggtatgatctcggctcactgcaacctctgcctcccaggttcaagccattctcctgcctcagcctcctgagtagctgggattacaggtgcccgccaccacacccggataattttttttgtattttttagtagggacagggtttcaccatgttggccaggctggtcttgaactcctaacttcaggtgatcaacctgcatcggcttcccagagtgctaggattacagatgtgagccaccgcacccagccagaaagttttattttaatctaagttagagcaagatggtttctgttgcttgcatccaatgaagacctaagtaacaatggtccctcatcataagcactgtgacacactgatctggtttggctgggtccccacccaaatctcatcttgaattcccaggcgttgtgggagggaactggtgggaggtaattaaatcacggggcaggtctttcccatgctgttcttgatagcgaatgagtctcacaagatctgatggttttcaaaagtggcgtttctctgcacaagctctcttctcttgtctgccaccatgtaagatgtgcctttcatcgtccaccatgattgtgaggcctccccagccacatggaaccataagtccaatagacctcttttttttttgtaaattgcccagtctcaggtatgtctttatcagcagcatgaaaacgggctaatacactaatacacacacacatccatacacatacacaactgtgtaggcacataccgtacaaatacatagaccctgacacaccttagtgtacgtgtctttatttctggatgatataaaagaaaaaacttaaaaaacaccccaaaccaaacaccaatggatccccaaagcgatgtgactccctcttcccacccggataaatagagacttctgtatgtcagtctaccctcccgcccccataaccccctctgctatagacatactctgggtatatattactctactcggcaatagacatctcccgaaaatagaattcctgccctgacacctgactcttccctggccgcatcagaccacccgccactgtagcacactggtgtccttgccccctgtggtcagggccatgctgtcatcccacaagaaggccacatttgtcacatggctgctgtgtccaccgtacttgtggctgagggcctgttacaaggaaagaagtaagtgaagaaatgtcagtggggacaatgccaccccatcatggtcctcttgtcttgacccggttcttttctgctcttcctctttttttttttttttaatcacttagagtgaagtcacttaggtatgagcacagcttcaatgcagccttgacctcctgggctgaagggatcctcccacctcagtctcccaagaagtagctgggatcacagatatgcgcccccacacctggctaattctttttccttttatagcaatggggtgtcccagtgttaccagggctaataagccctttgtttaagaaccaacagaggccaggcgtggtggctcacgcctgtaatcccagcactttgggaggccgaggcaggcggatcacaaggtcaggagatcaagaccatcctggccaatatggtgaaaccccgttctctactaaaaatataaaaattagctgggtgtggtggcgcatgcccgtaatccgagctacttcggaggctgaggcaggagaatcacttgaaccagggagtcggaggttgcagtgagccaagattgtgccactgcactccagcctggtgacagagtgagactctgtctcaaacaaaaaagaaccaacagaacagctgggcatggtggctcacgcctgtaatcccagcactttgggaggccgaggtgggggtggatcacttgaggtcaggagttcaagactagcctggccaacgtggtgaaaccccgtctctactaaaaatacaaaattaggcctggcgtggtggctcatgcttataatcccagcactttgggaggccaagttggggagatcacttgaggtcaggagttcgataccagcctggccaacgtggtaaaaccctgtctctactaaaaatacaaaaaaattagccgggcgtggtggcacacgcctgtagtcccagctatttgggaggctgaggcatgagaatcacttgaacccaggcagcggaggttgcagtgagccgagatcgtgccactgcactccagcccgggcgatagagggagactctgtcaaaaaaacaaaaacaaacaaaaaacccagcagggcaactgaattggtttattcagcaagttaatggcataaatagaagaaatagcatgcacgtggggaaggctattctacatgctgggatttgagacataagcaaatgtagtttggaccctggttcaaacaaaccaaccatagaaggccagtctggggcacatcagggaaatatgaatatgtactggctatgagatcatatttaggaattaacgttttgtttttgccttcctagggatgaggcatgtaagaaattaatgttgctgggcgtggtggctcacgcctataatcccagcactttgggaggccgaggcaggcagatcgcctgaggttgggggttcaagaccagcctgaccaatatggagaaaccctgtctctatttgaaaaatacaaaattagccgggcatggtggtgcatgcctgtaatcccagctactcaggaggctgagtcaggagaatcgcttgaacccaggaggcggaggttgcagtgagccaagatcgcgccattgcactgcagcctgggcaacaagagtgaaactctgtctcaaaaaaaaaaaagaagaagaaattaatgttaattaggagtggtcagaggcttgtggatatgtaacaattcttcttcttcttcttcttcttttgagacagaatctcgctcttttgcccaggctggagtgcagtggtgcaatctcaactcactgcaacctccgcctcccaagttcaagtgatcctcctgcctcagcctcctgagtagttgggatcacaggtgcccgccaccacccatgactaatttttttgcatttttagtaaagacggggtttcaccatgttggccaggctagtctcgaactgttgacctcaggtgatccgcctgcctcggcctcccaaagtgctgggattacaggcgtgagccaccgggcctggccagaattatccttatttttttaggcatgaatgctcaatttagagggctaaaagataacctatgcgttttcgtgtgtgtgggtttttttgtttttgtttttgttttatgacggagccttgctgtcgctcaggctggagtaaagtggcacgatctccgctcactacagcctctgcctcccgggttcaggcaattctcccgcctcaccttccccagtagctgggattacaggcgtgcaccaccaggcttggctaatttttgtatttttgtattcttttttttttttgagacaaagtctcactctatcgctcagtgcattgttgcttagtggagtgcagtggcgtgatcttggctcactgcaacctctacttcttgggttcaagcaattctcctgcctcagcctcctgtgtagctgggattacaggcgcctgccactacgccttgctaacttttgtatttttagtagagtcagggtttcaccatgttggtcaggctggtctcaaactcctgacctcaggtgatccatcaccttggtctcccaaaatgctgggattacaggcttgagccaccgcacccggccacatatgcagtttcttaaaactacagaccaggacaggtactgtggctcatgccttgtaatcccagcactttgggaaactaaggtggagaggattgctcaagcccaggagatcaagaccagcctgggcaacagagaacctatctctatgaaaaatacaaaaattggccaggtgtggtggtgcacgcctgtagtcccagctactcagaaggctgaggtgggcggaccgcttgagtccaggaggtcaaggctgcagtgagccgagattgtgccatgccactgcactccagcgtgggcaacagagtgagaccctgtctcaaaaataaaaaataaaaaaagaagagaaaggagaaagaagaaacaaatgaaataaatataccaaatctggtaatagttgaacatgggtaacaggtacaggaggagtcactgtactagtctttctgcttttatgcatgaaaatttcctaggaaaatgctgaaacaatccctcttctgttagaaccagagaatggtaaaattaacgtccagcttttttttttgtttttgtctttgttttgagacaaagtcttgctctgtcgcccaggctagagtacagtggtgcaatcatggctcactgcagcctcaacctcctgggctcaagcaatcctcccacctcagacttccttgtagctggaactacaggcatgcacaaccatgcccagctaattttgtgtgtattttgtagagatggggtctcactttgttgcccaggctggtcttgaactcctggcctcaagcaatcctcctgcctcagctttgcaaagtgttgcgattacaggtgtgagccactgcaactggccttggcctcccttaaaaactcataagatctggttgtatatcctgtgcctaggtacatagtaggtgctcaataaatatttactgagttaacaaggataaaagaaccaaagagctcagaattgcagttgctcagaacttcagagaaccaggtcttcaccatgacacactgaaattcatccaccttggggttaagaaaggcccttgggatcaagactactgtcctccttgtacagatggggaaaccgaggctcagagaaggggtggggttggaccagagctgcctgaattttgtccccacccctgcttgctacccccgtccatccccatctccccaagggactcactcgaggctgacagcaggggtagctaaacaggtgaactttgccaaagtcatcagctgaagccagcaacttcccatcatgagagcgggccacagcgttgatatcagtgccgtccgccccctcagaccagatccctgtgggcaagatgaagggaagtggtaagatgtcagctggagccagggaccgccaagaggagcagattgccactccagccaccttaatttgttccgacctagcctgtatctatccgaggatatgagtcagaattaccttaaaatgtgaatccgagcctgcccctgctctgcttaaaacccttccatggctccctggtgatcttagaagaaagcctgtggttctaaggctcagcaggccccatgcactgctccagcctcatccctcatcagtgctcctgttaaactctgtaatgatttggccaccctgcctccctgcatttctccaaatgccaagttctgtgtcacgcgtgggcttttgtatgtactattccctttgccaagagactgctttccttcttcactgccctggaaagtaactcctcatcctccaggtcctagctcagatgtctcttcctccaggaagccctccctgattccctccaagagtaggccagatgccccaccctgggtttccctgtctcagacctgctcactctgggtcatcactgtctggggacaagtctgcctcccccactggactgagagccacaggagagcagggccgtcagtcatggtcactgccaagcccacggcaggcacagaactgctcagggaatatgtgtttgcttcattcgtgcctgaatgaatgggtggctagggcaccggcagtgtggatctctcctggccagttaccacgcccatttggtttcattttattacagctctaatgagtcatctcaccctaccctttcctcttacacaaatacagcccacatgcagtaaagcagtgagcttcccacactggaggtaagcagtaagactctggaaaccaccagcggggatgtctctcagaactactgtcctcagtgagacctctctcattccagaactcaccaaacaccccaaaccctaggacacaagtagctgtggcccattccatgttcctcacagcatccgcactggtgatctgcttacaggtagccgggtcccctggggcagaaaatgggaggagacattcagagttggaagaactacccagtaaacccatccctttcttagacaatcggagctgaggtccaagacagaggaggctaaggtcccagggctcattctacctgtcaggactggctgagaaggcatcacatgctggggtcttcacagcccgcagcgtaagcaggagcatctacttttaaacccgcatctggccgggcatggtggctcacgtctgtaatcccaggaggcagcatgagccacagcatctggctggatcacctgaggtcaggagttcgagaccagcctggccaagatggtgaaaccccatctctactaaaaatacaaaaattagaccaggtgtggtggctcatgcctgtaatcccagcattttgggaagccaaggcaggcggatcacctgaggtcaggagtttaagaccaacctggtcaacatggcgaaaccctgtctctactaacaatattttaaaaattagctgggcgtggtggtggacacctggaatcccagctactcaggagcctgaggcaagagaatcgcttgaacctgggaggcggaggctgcagtgagccgacatcgtgccattgcactccagcctaggagacaagagggaaactcccatctcaaaaaaaaaaaaatacaaatacaaatattagccgggcatggtggtgtgctcctgtaatcccagctactcaggaggctgaggcagaagaatcacttgaacctgggaggcggagcttgcagtgagccgagatcgcgccactgcactccagcctgggggacagagcaagactccgtctcaaaataataataataataataataataataataataattaaaaatttaaaaatgtaaaaaaagaaacctgcatcctacccatccgaccggaaaggggaggagttgactaaaagtggggtataccagggagaaaatgagaagccagcggtccctaaattccaaatcagaaccagccttgaataccaagggagcgaggcttgaagcccctccctcccctcccagaactcagggaagtctgcaaatgagacggaggaagtaatgtctctgggtcccggagaactcacagtacagaatctcatagtccccggagttggtgacaaagcagctgctgtcctgggcccaatccaggtgggtgataaaactggaatggccctgcgggggagggaagggatggtgttagagctgcagagggcggaaccaaggagagggggacaggattaaatcaggaaagtggaagtcaaatacagaggtagggcgagaacacaaggggactaaaggaaggatacacaggcctttggagtatgggggcagggccagaatactgtgggcggggccagactgtgatgggcagggctagacaaaaagcacttagaacacaatgggagtttagaacaggtgggcagggctagacacggaggagctggctttgaatgttgaggggcggggctacacagaggggcggtctcggaacgtgaggggcggtctcggaacgtgaggggcggggctacacagatgggcttagcacgtgggggcggggctacacaaaggggcgggcttagaacacacgaggtggtgaatgtgtggacgtggccaagactccttgctctgatcagggcagaatcagttgagtgttgaagctgcgctcccttgaggtagaaaattggttaattttgcaccccctgggcggggtggcggcgcgggctgggggccactgcccactcaccgagcacttgcccaggcggctgaccttgcggccgccctggtccaccgtgtacacgtacaccaagttgtcgtgggagcccacggccaggtacgccccgtctgggggagggggaggggggctatgaggaggcacccaggctccatcccctcctcgcccagactcagccccctcaacagtccccagctccatccccactgcatccctcctaggcctcgcttcgcaggctccacccctccccctgccaagagctctgagcctctgtcccctggccctgccgcttgggtgtcccaggcctgccgcttacctggggagaagctgaccactgagatctgttcattgccgtctgtgtggatagccaccaggtcatgggtctccgtgtccagcagcagccatcttgaaggagagggcgtggtggggggaggaggggtgagctgatctgacagagagaggccgcaatctgtggggtctaagggagggatcagagggaccccagaagtgacctgggctgggcacggtggctcaggcctataatcccagcacgctgggaggccgaggcgggtggatcacttgaggtcaagagttcgaaatcagcctggtcaacatagcaaaaccccgtctctactaaaaatacaaaaattagccaggcgtggtggcacgtgcctgtaatcccagctacttaggaggctgaggcacgagaattgcttgaacccgggaggcagaggttgcagtgagctgagatcgcgccaccggactccagtctgggcgacagagcaagactctgtccccccaaaaaacaaaacaaaacaaggccaggtacagtggcggtggctcacgcctgtaatcctagcactttgagaggctgaggcaggtgaatcacttgaggtcaggagttcgagaccagcctggccaacatggtgaaaccccgtctctactaaaaataaaaaaaaattagccaggcatagtggtgggcgcctgtaatcccagctactcgggaggctgaggcaggcaaatcgcttgaacctgggaggcagaggctgcagtgagccagaggaatattgagggatcagggctcggtaaatagtgggatttgggaaagtaggaaagagggaagaagggccagttccccagggagcagagaaggcctcccgaaatgctctcctcagctttacctgccagtcactgtacccacagccaggacagagccactggggtggaagccggctgagcgggcagggtcctgagaagggagagagaagaggcagggctcagagctggggtcccatgtccatctggacattctcttgcctcagggccaagtctaatctttgcatgagggctctcccctccctctgctgccctttgggacacccccaccccagacaccatggcagccattcctctttacatttctgtagcatgttaacctgaacagaaaccattcctcctgtcactcctgtcccgggatccctccttactcctcttctaaattcccacagctttattcatccaagacgacttctttagataatttcctagatgtgggaatgctgggacaaagggcatctagaattttaagactttatttttgttttttattttttaaatttttatttatttttttgagatggagtttcactctgttgcccaggctggagtgcagtggcacggtctcagctcactacaacctccgcctcctgggttcaagcgattctcctggctcagcctcccaagtagctgacattacaggcgcccaccaccacgcccggctaatttttgttttttttttttcattttttgtaaagatggggttttgccatgttgcccaggctggtctcaaactcctggattcacacaatctacctgcctcagcctcccaagtgctgggattacaggtgtcagccaccacacccagctgaaatttttattctgtttacattttaattaattgtgaatagccatgtgtggccagtggttaccctatgggacagtgtagctctacacttgactgttgcagcggtcacaccttccttgaactcagcggctcctgactcccccctcctcatggcggcacccctgacaggatggttcggtgtcgtcctgggctcccttccagtcaagaacctactcctccaacccttctgagagagcttctaagcacccagttccctagatgaaacccccaccctgcttaaaaagaccttgtttgggccaggcttggtggctggcatctgtaatcccagcactttgagaggccgaggcgggcggatcacgaggtcaggagttcgagaccagcctgaccaacatggtgaaaccctgtctctattaaagatacataaattagctggacatggtggtgtgcacctgtaatcccagctactcgggaggctgaggcagaagaatcacttgaacccgggaggcggaggttgcagtgagccgagatcgtgccattgccctccagcctgggtgacagagcgagactccacctcgaagaaaaaaaaaaaaagaccttgtttggtttcagtctaatgtgctgagccctgacacagggggaaaggtagttctgttagaatggtgcttttccagtccccgggccccttacctcgatgatcctgctccacaggggctggtgggaatctgagctccatagatgcaccagcttatcctgcccgcaggtcacaaactgggcccgactggggtgtgtggccaggccccacagctcttccacatggccctggtggaaagggaggacagcaggatggagacagcagccctggccttttcccactcaacactaatgccagacaaatgctagatgagccccagcaactcaccctgccccagcgggacccagggaagacctttcccagtatgtctgaagggggcctcaattgggcatctgaacccatgccctggtgtgtgactcaaggcaaatcctgccccttctccagggacctctgctttcttctttgcacaatgggaggcaggagggcatggtggctcagagcttgatctcaggggtcagacaggctgcaccctggccacacacctcccaggtctccagctccaaggatctgggaaggcgcttctggagtctgcctgcatccagacagagcccagaagtctgagggacctcatggagggcactaaacctgatggctctgaccttcggctttctattactgaccgagcgcagtcatctaggcaggtgacatctccttgggacctcagtttgatcgcctgtaaaatggggccaattggtatgtatgcctcatagcattcctgtgctcactcaaatcatggatggaaaatgctggccaggtgcggtggctcacgccggtaatcccgacactttgggaggctgaggcaggaagattgagctcaggagtccgagaccagcctgggcaacatggcaaaaccccatctctacaaaaaatacaaaaatttgccagttgtggtggtgcacacttgtagccccagctacttgggaggctgaggcaggaggatcccttgagcccaggagacggaggttgcagtgagctgaaatggcatcactgcattccaggctgggtgatataataaataaataaaatgctaaacatgaggataattcagagaatgtggtcacaaaatggaaatgtctaactattaatatttataacaaattttttttttagacggaatctcactctgtcatccaggctggagtgcagtggtaggatctcagctcactgcaacctctgcctcccaggttcaagcaattctcctgcctcagccttttgagtaactgggattacaggcacacgccaccatgcccagctaatgttttgtatttttagtacagatggtgtttcaccatgttgcccaggctggtcttgactcctgatgtcaagtgatctgcctgcctcggcctcccaaagtaatattaatattatgattaataattataatagccaatataatagtatgggctgggtgcagtggttcatgcctgtaatccccgcattttgggaggctgaggtgggtggatcacttgaggtcaggagtttgagaccagcctgaccaaaatggtgaaaacccatttctactaaaaatacaaaaattagctgggtgtagtggtacatgcctataattccagctactcgggaggctgaggcaggagaatcacttgaagcgggaggcagagtttgcaatgagccgagattgagccactgcgctgcagcctgggcaacagagcgagactctgtctcaaaaatgaaaaaaaaaaaaaaaaagtataaatatagtgcttcccggtaggtgagttctttaattgggtcaggggtaaggaagggagggaggaggccaggaagggaggagcaggcgtttgagcttcgagaagaaatgcaagcagactccagcaggaccttccccaatccgtggagctggagtctgagaggtgtgtggccagggtgtctgcagctgtgggacaacctgtagggacactcaccaacctgaagggtgccacccccaatcagagtggcaggaggcagcacagttggagcaggggcctggggcccctctgctgtgcttggagttaaactcttggttgctggatcctgggaaggggtcctgggtcagggccaggtcagagaagggacagagcagggaggtgaggagaactgggagtggggagggggagtggatgatgcagggaaggccagggaaagagctgggaagaggggaggggtgcagaggagagaggcgcacctggaccagcagtgagaagcctgtgtgcacggagccctgcaggatggaattgcgggtggtccccacgtacagtgtgtctccgtggccctctgccacggtgcgcacagggccaaagtcctcagggacctgggtggacagataagagggaagatgagtaggatgcacacgggtgggtgtggggtgacatactgtggggaggagggtctggcgttgggagccctggtgagatcggggggggcctctctacccccatctgagcccactgcccctcctcacctccacttcctgcagcttgctgtagtcagaaccccagaggaccacccgccgatcacggccccctccagacaccagcgtcccgtcccgcagggcgcagagcccaaacacgccgccgtcgtgggcgcccagcaccgcctgtgtgatacggttcccacctgcagggtggccaggggcagggtcaacagggagaagccacccctatgctgacccctgaaagcatcttgaactctcaagcctatgtccatccattctcacccacttttccaccttttttttttttttgagacggagtctctctgttgcccaggctggagtgcactggtgctatctcggcccacttcagcctctgcctcttgggttcaagtgactctcctacctcagcctcccaagtagctgggattacaggcgcccaccaccatgcctggcgaattttttgtttctcgtagagatgggtttcaccatgttggccaggctggtctcgaactcctgacctcaagtgatccacccgccttggcctccctaagtgctgggattacaggcatgagccaccatgcccggccccacctttcgacctttctatctgctcttccacccacccaaccacccaagcacctgccacctacccactcaaatacaataccttatcatctattcattaaaccatctgcactaacatctacccatccacccatctaccctttgacccatacacccacccatccatccatccactcacttatctactggtctgttagatgaacactatcgactcatccattcatcacccatccatccaccagactatctatccatccatcaccctagccattcatccacccatctctctactgatccatccagtcagccaccctgccatccatccatcaacccacctctcatccattcatttgccctctctcgttttgttttgctttgttttgttttgttttgttttattttgtttttgagacaaagtcttgctctgtcgaccaggctggagtgcagtggtatgatcttggctcactgcaacctctgcctcctgggtttaagcgattctcatgtctcagcctctggagtagctgggattacaggcatgtgccaccacacctggctaatttttgtatttttagtagagacagggtttcactatgttggccgggctggtctcgaactctttgactcaagtgatctgcctgcttcagcctcccaaagtgccaagattacaggtgtgagccatggcacccaatctaataaagacaattttttaaaaagagagggcaggcggccgggttcggtggctcatgcctgtaatcccagcactttgggaggccgaagggggcggatcacgaggtcaggagattgagaccatcctggctaacatggtgaaaccccatctctactaaaaaaatacaaaaaattagccgggagtggtgatgggcacctgtagtcccagctacttgggaggctgaggcaagagaatggtgaacctgggaggtggaacttgcagtgagctgagattgcgccactgcaccccagcatgggcgacagagcgagactccgtctcaaaaaaaaaaaaaagagagagagcgcaggctggccgagtgcggtggctgatgccgataatcgcagcactttgggaggccgaggtgggcggatcacgaggtcaggagatggagaccatcctggctaacacggtgaaaccccgtctctactaaaaatacaaaaaattagccgggtgtggtggcgggcacctgtagtcccagctacttgggaggctgaggcaggagaatggcgtgaacccaggaggcagagcttgcagtgagccgagatcacttgagctcaagtgttcgagggcagcctgggcaacatagcgagacctcatctctacaacaaatacaaaaattacctgggcctggtggtgggcacctgtagtcccaggtacttgggaggcaggaggatcacttgatactgggaggcagaggttgcagtgagctgtgatggcaaccactgcactccagcctgggcgctagagtgagaccctgtcttaaaaaaaaattctttattaaaaaaaaatttttttttttttgagacagagtcttgctctgtcccctaggctggagtgcagtggtgccatctctggtcactgcaatctccacctccagggttcaagtgattctcccacctcagcctcccgactagctgggattacaggtgctcgccaccatgccaggctaatttttgtatttttagtagagatggggttttgctatgttggccaggctggtcttaaactcctgacctcatgtgatctgcctgcctcggcttcccaaagtgctgggattacaggcgtgagccaccgcacccagcctaaaaacttttaaaagtaaagatgaggtctcactatgttgccctggctggtctcaaactcctgggctcaaccagtcctcctgcctcagcccctcaaagtgctaggattacaggcatgagccactgtcccagcctcaacccattagtttgttaataaagtcatccattggttggagcaagtatttcttcacccaaccattggctaagacaagtcatttattcatccaatcactgattaacttcttggaacaatctgttcttcataacacattaatctgttggctgaaacaaccattcattcattcactcactcattcactcattcattcattgctgtatagatccactgcctgagacaaaacctattcactaacatagttagccattagtggtaacaaccactcatttgttcctttacccagtcactctccctttaaggaggatgacacattcatttacttattcttccatccatttcctaggatcacaccttcattcattccttcattcacttattcattgatccacacgctgggacaaagcacttgtccatgtatccattcatctacccatccgtccttccttccatccacccatccatccattcatcatctaaacacaactgagctaacccattcattgataatctggacttgatccctaacaagggatttccagagggcaaggcaggggggagtcaataaagatttcctggagatagggatacttgagctgaaccttgacgagggtgttggaatcggacatccatttacactcatttcacacaagcagaattccacgaagggaggcagagccaggagtgtttcagaagactggattgggaaccaaacagatggggtgacactgacctttgccccaaacatagaggttccccccagagtcccccgtgaccacgtcgccaccttccaaaaaggtcacacacagcacatacttcggtttctcatgtttctaaggtgggggaggaaaggaaggtgtcagagcgtcactgaagcaggtagcctcccagaggtcatctgtcacccaggaccgtggccaggcaatcccctctatctatgcgtttagggtaaggctctgcgtggagcatcccttctcccacctgcctccatccggcctgcagtgcttcggtggcctagaggttctgaccacaattgtcttgctttcctacccctgggcccacttcctgccctctctctggtccccctgactctttcttttgagatacagtctcacctgtcatctagaccggagtgcagtggcatgtctcggctcacagcaacctccccctcccgggttcaaacgattctcctgcctcagcctcccaagcagctgggattacaggcctgcgccatcatggccggctaattttgttttgtttttgtttttgtttttcagacggagtctcgctctgtcaccaggctggagtgcagtggcgtgatctcggctcactgcaacctccacctcccgggttcaagcgattctcccgctgcagcctcccaagtagctgggattacaggcgcccaccatcacgcctggctaattttcatatttttttagtagagatggggttttgccatgttggccaggcgggtctgaactcctggcctcaagtgatccacccgcctcggcctcccaaagtgctgggattacaggcgtgagccaccgcacccagcctggtccccctgacttctcccctcctgtcggcgcctcattcatcctgtctctcctcctccctcctcacctccagtctgtctctctaggtcccattccctgcctcactccaccttctcagtgtctctgtttcatctccgtgcccagtgttctctgggcttcccttttggggtggaagccccatctctcaccaaaggcaatgagccctatgggaggaagccctgtgtcttcccaccctctgcttcccactcaacttgtggctctctcagccaggcagcctctgagttctctgattatccatcatatcgacaaccgcagcacccctgtttttgtttttgtttttgtttttgttttttttgagacaggatctcactctgtcacccaggctggagtgcagtggtaccatcatggctcattgcagtcaacctcctgggctcaagcggtcctcccacgtcagcctcccaggtagctgggattacaggtgcgcaccaccatgcctggctaatttttgtattttttgtagatatgaggtctctccatgtttcccaggctggtctcgaacttctgggctcaagggatcctcccacctcagcctcccaggtaactgggattacaggtgcacaccaccatgcccagctaatttttgtattttttgtagatatgaggtctcaccatgttccccaggctggtctcgaactcctgggctcaagggatcctcccccctcagcctcccaaaatgctgggattacaggcgagagccaccttgccacagtacccatttattgaccatttactatctgctaggaactgctgtactcttcatccctttgaatcctcacaactttttttttttttttttttttttttttctgagatagggtctcgttctatcacccaggctggagtgatcatttgatcacggctcactgcagccatgagctcaggtgatccttccacctcatggtgcccggtcaccctcttaactccagagttaaggtggatcatcaccatggtatggagaaagaaactgaggccccagcaggcaacatctcagcgtccctgtaatcccaaacccctgccaccctctgggggatcttgctacctccctgcctgtccctaactacctctctcagggccagcctgtcccccaaacccctggcactcacctcaaagaggccttgccgcttgctcaagctgcccccctccaaggtccagaagtagatgtgagatttcccgcaggtgataagcacagtggggtccgtggggtggaaggtggccaccaatacagcctcattggagcactttggggggtgggggagattctgaatgaggacctcaaagtccccaaggctactatacccgcccctcacaggactgccctaaacggctgtttgtgttgtatgctgcacacctgaacttttcttttttttttttttttcagggcagagtctcaccctgtcacccagactggagtgcagtggtgcaatctctgctcactgcaacctccgcctcctgggttcaagcgattctcttgcctcagcctcccgaatagctggtattacaggcaggtgctaccacacccagctaatttttgtattcttagtagagacaggatttcaccatgtttcccggctggtctcgaactctttacctcgtgatccacccgcctcagcctcctaaagtgctgggattacaggcgtgagccactgcgcccggcctttttttttttttttttgaatatgagtctcgctctgttgcccaggctggagtgcggtagcacaatcttggctcctacaacctctgcctcccaggttcaagagattcttctgcctcagcctcccaaatagctagatttacagggacgtgccaccacacctggctaatttttgtatttttagtagagatagggtttcaccatgttggccaggctggtctcaaactcctgacctcaagtgatcttcccacctcagcctcctaaagtgctgggattacaggcgtgagccaccacgcctggccagtacctttcctatacggtaaattaaagtacaggaagcaggacaagccagcgaagcattatcatcttcttcatcattaacaaaacagcagacacttggagctcctctcctctgccctaagcactgtgctcaacattttacaatcattagctcctttaatcctccatctccctgtgaggtcaagaccattatgcccacctcattgcaaattaaaaagtgaggctcaggctgggcgtggtggttcacgcctgtaatcccagccctttgggaggccaaggcgggtggatcacctgaggtcgggagttcgaggccagcctaaccaacatggagaaactccgtctctactaaaaatacaaaattagctggtcgtggtggtgcatgcctgtaatcccagctactcgggaggctgaggcaggagagttgcttgcttgaacccgggaggcggaggttgcagtgagccgagatcgtgccagtgcactccagcctgggcaacaagaggaaaactccgtctcacaaaaaaagtgaggctcagagagggccgggtgtagtggctcacacctgtaatcccagcactttgggaggccgaggcaggcggatcacgaggtcaggagttcgagactggcctggtcaacgtggcgaaaccccatctctactaaagatacaaaaaaattaggcgtggtggtgcgcacctgtaatcccaactacttgggaggctgaggcaggagaatcacttgaacccaggtggtggaggttgcagtgagccgagatcatgccattacactccagcctgggtgacagggcgagactccatctcaaatagaaaaaaaaaaagtgaggctcagagagggtaaaccatttgcctaaggccacacagctaggcaagagttgtgtgtggaacccagctcacctagccctaattccagagcacagcctccgcaccatttctgtttccccaaacagtgggccttgattcaaaacccaggtttccaccaggcgcagtggctcacgcttgtgatcccagcactttgggaggcagaggcagatggatcacctgaggtcaggagttcgagaccagcctggccaacatggtgaaaccccgtctctactaaaaatacaaaaattagccgggcatggtggcacacacctgtagtctcagctactcaggaggctgagtcaggagaatcgctggaacctgggaggtggaggttgcagtgagccaagattatgccattgcactccagcctaggtgacaagaacgaaactccgtctcaaagtaagtaagtaagtaagtaagtaagtaagtaaataaataaataaatagaacaaaacccaggtttccttcccctagcccaggacaggtgtgcaacctgaggcaagtatctcttcccctcaccatgcctcatccttaaaataggccacctctcagagagggaaatcgagacaccagaggactgcagagtcagcaagcagccacctcaaacccacccttctgttgggcctggtccaccgtaccccatatctccatatcctcaccaaggccctacgaggaagatgctaccattatccccattttattttatctatttatttttttgaggcagggtctcactctgttgcccaggctggagtgtaatggtgcaatcatggctcactgcagcctcaacctaccaggttcaagcgatcctcctaccttagcctccgaagtagctgggactatgggtgcacaccacacccagttaatttttttttttaagtgccagattttctgtttgttttgttttttgtttttgagacggagtttagctcttgttgcccaggctggagtgcaatggtgtgatcttggctcaccgcaacctccgcctccgggttcaagagattctcctgcctcagcctcccgagtagctgggattacaggcatgtgctaccatgcccagctaattttgtatttttagtagagacagggtttctccatgttggtcaggctggtctcgaactcctgacctcaggtgatctgcctgcctcggcctcccaaagtgctgggattacaggcgtgagccaccgtgcccggccttttttttttttttttaagtagagataggtctccttatgttgcccaagctgatctcaaacttctgagctcaagcaatcctctcatgtcggcctcccaaggtgctagggttacaggtgtgagccaccttgcccagcctattatccccatattacagatgagaccaccaaggctctgaggtggcaagcggcttgctcaagtcacacagccagcaaggagtaaagccagggcttaaacacgggtctatctgattgcagactcctaaccactgagattgggaaagtcccacagtggcacccagcaggaggggatgagaaaagtcacctcaccttgacatccaccaccttggtctccttggcccagtcccacaccgagagcatgtgatcattggattcatccactgcacacagcaggttgcctccattctaaagaggaggagagaggagggggacagaggcaaggggagtcagggcccatcctccccccatgcccaccaaggcattcaccacacaggcctgttttaaaaccttcaggctgggcacagtaggtgggaggatcgcttgagtccaggagtttgaggccagcataggcaatatagggagaccctgtctcttaaacaaaacaaatttaaatattaaaaaaaaataaaaagccaggcgtggtggctcacacctgtaatcccagcactttgggaggccgaggcaggtggatcacgaggtcaggagttcgaggccagccttgccaacatagtgaaaccctgtctctactaaaaatacaaaaaattagccaggcgtggtggcaggtgcctgtaatcccagctactcgggaggctgaggcaggagaatcgcttgaactgggaggcagaggatgcagtgagccaagattgcgccattgcactccagcctgggtgacagtgagagactctgtctcaaaaaaaaaaaaaaaaagaccttcaaaggccctggccattttgcaggaaacacattaaaatacaccctccattagaagctgtgaagacatctgaaatggtttcatactatgccttgaaatgactcatccctaataaactcatttcatttgccctcagctattgtttctctgcagccagcacccctagccaggaattcttgctgacatcatctcatttgcatttacatatatagagaatgactgatgtaggtgaaattcagcagttaacaaagttggtattatgttgggtttttgtttgttttttattttattttattttttgagactgagtctcattctattgcccaagctggaatgcagttgcatgatcttggctcactgcaacctccacctcccaggttcaagcgattctcctgtctctgcctctcaagtagctggcacatgccaccactgccctcctaatttttgtatttttagtagagacagggtttcactatgttggccaagctggtcttgaactcctaacctctggtgatacaccagcttccaccttccaaagtgctgggattacagtcatgagccacctcgcctggccaatgttgggcttttatacctttcattaaatacaggttaattttgatttggcaaggttttattttcttctccacacctttggtaacaatatggcttacccctaccccaagctcttaaatgtttctttaggcctcagaaaaccggtgagggtccaatccagtgcctcttaagctatctgtgcaggagactggctgttttttactccctaatccattgaagactaatattttaatcaaatatgataaaaatgtaaaatatgatttttatctatctatctatctatatatttttgagacagagtctcactcggtcccctagtgtggagtgcagtggtgggatctgagctcactgctacctccgcctcccaggttcaagtgactctcctgcctctgcttcctgagtagctgggattaccacacccagctaatttttgtatatttttagtagagatggggtttcaccatgttggccaggctggtctcgaactcctgacctcaaatgatccacccatcttggcctcccaaagtgctgggattacaggcatgaaccgcatctgaccaatttttatttattttttaaagtcagcgtcctgccatatcgcccaagttggagtgtagtggcatgatcacagttcactgcagcctcgatctcctaggctcattcaatcctcccacctcaacctcccaagtatctgggagtacaggcccaggcccacactagtacacccagctaattagaattttttttttttttttttttttttttagttggagtctcgccctgtcgcccaggctgcagtgcaatggcgcgatctcggcggctcactgcaaactccgcctcccaggttcaagcaactctcttgcctcagcctcccaagtagctgggattacaggcaccctccgccatgcccagctaatttttgtattttcagtagagacggggtttcaccatgttggccaggctggtctcaaactcctgaccttgtgatccgcccgcctcggcctcctaaagtgctaggattacaggcgtgagccactgcacctggcctttttttttttttgagtacgagtctcgctctgtcgcccaggctggagtgctgtggcgcgatctcgactcactgcaaactccccctcccgggttcaagcgattctcctgcctcagcctcccgagtagctgggacgccaccacctcagactaatttttgtactgtttttggtagagacgggcttcactacgttggctaggctggtctcaaactcctgacttcaaatgatcctcccacctcagccccccagagtgctgggattacaggcacaagccaccatgcccagccaaaataggatttttttttaaaaaaaagcccacaatcacacacttggatgttgtggtgttgtcaaactgctctccaaattcctaaaggcatactctcgctttctgtacttatctctgcctggacatgccaaaacccgcctgcaaatgggcaaggaccagctgggccctaggcactgggtttaaaatgcctgagagggctgggcgggcacggtgactcacccgccccttggggtgaggacacgccctcattgtgacgtcacagaggcgggccacgcctccagcaggattcccggccctcaacccaaggggcgggtgaaaaggtgcgggcacttgccctccttttcggggcgaaggggcggggttagggtgggcgaaggacttacagatttggagaagcccacacagcacacggctctgtcaaacacccccaagcccagcacgtgtaaggtggagagggaaactgagtcccagatgcgcacgtggggcggcagcggctgcagggaagagaggcttgttaccttgggggtgccagctgcttgtcccccacaactgcgtcctgcactcttttctgctttcccctcccttccattaccttcccttccttagtggttcccgccacctgtcccgtggcgatggtgaccatatctgggtggatggccaagctgcggaaagaagggacagagagaccagggctcagtgggagagaagaggctcacagagacccaggacattcattccacaaattggctggttgagtttagtcaataaacgtgtatttagtgcattaatagcagtgagcggatgccctccgggtgcgctggcgctggatcagaagcaagacttaggcctggggcctctaactcaaatgccagcaggacgcaggtctgtacctcacatagtggccaggagagcacacttatttaagggggctgacaccaccctgctccagccaccaggaattgtctggagtgcctattcagttttttttttttttaagaggcggagtctcccagcactttgggaggccgaggcgggcggatcaccagaggtcaggagtttgacacctgcctggccaacatggggaaaccctgtctctagtaaaagtacaaaaattagctgggcgtggtggcgggcacctgtagttccagctactcgggagactgaggcaggagaatcgcttgaacccaggagcggaggttgcagtgagtcgagatcgtgccactggactccagcctaggcgacagagtgagactagttctcaaaaaaagaaaaaagaaaaaaaaaggagatggagtctcgctctgtcccccaggctagagtgcagtggcaggatcatagctgactgcagcctccaactcctggacttcagcgatccttccgccttggcctcccaaagtgctgctttcacaggcgtgagccacctcgctgcccagattttcaaaagaagaaaaagatccaggcattgcgtgaattcactgtctgaattttttttgagacagagcttgctctttcacccaggctggagtgtggtggctcagtcactgcagcctcgacctcctgggttcaagtgatcctctcgcctcaacctcctgagtagctgggaccataagggcttaccaccacacccaactaaaacacctgaaatattgaaatattgatactcaatccacattttcccactaaattcagcctgagggcagctggtggctttggagagggagcaaaggcttagccttgccccaaaccccacagggtagcaatgtgaaaagaggcatagaggggcaggggctggagctccatctccagccacagctccctcccgtcccctctgtcccacatctcaccatttgatgtcatcgttgtgtcccaggtagtgtcgctgcctctgctcctccacgctgtatagcacggctacggaggccacaaagtacactatctccccggtgggcagcaaataaaggttggcccggcagtctcggccacggtagccatagctggagccacccaggggctggttaaggaatgtgttttgttgttgttgtttgtttgttttgtttttatttatttatttatttttaatttttttatttatttatttttttgagatggagtctcactctgtcgcccaggctggagtgcagtggcgtgatctcagctcactgcaagctccgcctcctgggttcatgccattctcctgcctcagcctcctgagtagctgggactacaggcgcccgccaccatgcccggcttattttttgtatttttagtagagacggggtatcaccatgttagccaggatggtctcgatctcctgaccttgtgatccacccgcctcgccctcccaaagtgctgggagccacggcacccagcctatttattttttcttttttttgagacgcagtctcgctctgtctccaggcagcagtgcagtggtgcaatctcagctcactgcaacctccgactccctggttcaaacgattcccctgcctcagcctcctgagtatctgggattacagacacacgccaccacacccagctaatttttgtatttttaatagagatgggatttcaccatgttggccaggatggtctcaatctcctgacctcatgatccgcccgcctcagcctcccaaagtgctgggattacaggcgtgagccaccacgcgcggcctgttttgtttttttaagacagagtctgtcacccaggctggagtgcagtggcatgatcccagctcactgcaacctccgcctcctgggttcaagccattttcctgtctcagcctcccaagtagctgggactacaggcagatgccatcatgccaggctaatttttgtatttttagtagagatggggtttcaccatattggtcagggtggtctccaactcctgacctcaggtgatccacccaccttggtctcccaaagtgctgggattagaggtttgagccgctggcgcccagccgaggaatgtattttgcatcacacacactggctgaggaccagactcaacaaggtcattggaatgaggtttttctgtttccactctcacccctgtagtgggctgatggtcccctcccactccaaaaaaaaatgaatgtctgtttccttttttttttttttttttttttttttgagatggagtttcgctcttgttgcccaggctggagtgcaatggtgtgatctcagctcacggcaacctccacctcccgggttcaagggattcttctgcctcagcctcctgagtagctgggattataggcatgcgccaccatgcctggctaattttgtatttttagtagagaaagggtttctccatgttggtcacgctggtcttgaactcccaacctcaggtgatctgcccacctcggcctcccaaagtgctgggattataggcatgagccaccgcgcccgggctatgtctgtttcttaatccccacaacttgcaaatgtgaccttacaaggaaaatgggtctttgcagatataattatagatctcaagatgagatcatcctggattatcagagtagcccctaaatccgatcacaagtgtccttataaatgacagaagaggcagcctcaatctcctgggcttaagtgatcctcctgcctccgcttcccaaatagctgagactacaggcatgcaccaccatgcccagcaaattttttgtatatttttggtaaagatgcagtctcgccatgctgcccaggctggtctcaaattcctgggctaaagcagtccacttgtcttggcctcctaaagtgctgggattacaggcatgagccaatgcacccagcctgcctggctaattaaaaagaaattttctgtagagatgggatctcgctttgttgcccaagctgatagttatctggtttatttgttaactgctcatattccccaataagactgtgagttccatggtggctgagattgggctgttttttttgtttgtttgttttgtttttttcatttctgtatctcctcctccaggaagccctccatgactccaggctgggtcagccctgtccctgtggattccccatcccagtcttgcacactctgggttgtcactctcaatgagtctgttcccatgctagactgtatgccccaggagggcaggcagatgctgtcatggtcagcactgggtccccagccctatgtctcagatgttcagaaaatatcttgaatgggccaagcacggtggctcacgcctgtaatctcagcactttgggaggccgaggcaggtggatcacttgaggtcaggagtccaagaccagcctggccaacatggcgaaaccctgtctctactaaaaaacacacaaaaaaattagccaggcatggtggcccatgccacccagctactgtagtggccgaggcagaagaatggcttgaacccaggaggtggaggttgcagtgagccaagatcgtgccactgcactctagcctgggtgtctcaaaaacaagaaaatatctgaatgattgtcaatatacatatatcctgaccccatgaaactgctctgacctgcagtcactgcaaaggggagcaatctgaggtcctcacttttgcagtctcagccacctctcatcagatgcttatcaagccctactggcaggacatttgggacagattccaggggatatttccagctgcctcgagaaggctctgggcacccagaaggccaggccatttcaccaaccaccctggctcctccaaagaggaaaccaaggcccagagagaagcagacaaggaccgggttcctggggtgtggactccaagctcaataggattttaggaaaaagtttgggtcccagaatcaggattgttgtctcctacctataacctcagtttccttatctggaaaggaggtataataatttccaaactgtaggcctcagagctcttggaggccactagttgtaaaaaaataaattcatacctggaataacttacaacagtgtctgtcagatagtaagtgcttgagttattattttggatttttttttttttttttttttttttgagaaaggagtctcgctctgtcgcccaggctggagtgcaatagcacaatcatggctcactgcaacctcgacctcccaggctcaagtgatgctcccacctcagcctccagagtagctgggaaccacaggagcatgccaccatggctggctattttttttttctttttcttttcttttttttttttttttttttttttttgagacggagtttcactcttgtggcccaggccggaaagcagtggggcaatctcggctcactgcagcctctgcctcctgggttcaagcgattctcctgtctcagtctcccgagtagctaggtttacaggcacatgccaccacactcggctaatttttgtatttttagtagagacaggatttcatcatattggtcaggctggtctcaaactcctgacctcaggtgatctgcccacctcggcctcccaaagtgctcagattacaggcatgagccaccgcgcccggcctgctattttatttcctgtaaagacgaggtcttgctatgttgctcaggctggtttcaaactcctgggttcaagtgatccacccacctcggcctcccaatgtgctgagttagtgttttatcagtccctgtgcatggggcacatactatgagctcagtacctttacacattatttcacaggtctatggacctgagatcataaaattcatttttcagagtcaagacgacttttccagggtcacacggccaggtacgggctggactggggtttgaacccatctctgtcagactccagagcccgggcttccagccattcccaactctttttgctcaaatgcaccaatcccactctggccacatagcccttgaacgtgctgtgcttgttttgtgtgttgcccaggcaggtctcaaactcttggcctcaaacgatcctcccaaagtgctgagattacaggcctgagctgccttgaccgcctttctatttcctcctggggggatgggagcaccaaggagattccagcaaaaggatacacccactccagcttgagccggcaagaaggcagctccgagcgtgtgtccaggctgtaggtgggtgccagctcgtctgggatcatcatgggcacagggcggcccctcaggaacattttcacggagccatcctctgccaggacacccccagaggtcaggcactgacaccagccccatccctattccctctcctcttccagctttatttatttatttttttaaaggcagggaaactgaggccagagaggcaaagacccagtagccaagactcctgacctctggctccagcctgtcaccccaacaagcaagcttccaccgagcccttccccatctccccactcacccacactgaagataacttctttggttttgctgtcaggaaaggacaaagaaaaaaaaagggtcttagtattcagttcagaaaaggggagaaaccattcctccacccccaccgctccccggaggtctccgatgaaaacggggccgagtaaggggcagagcgctgcctctctgcaggccgtgtgctttgctcggttgatcttgcagagcctaagacacaggcccagagaggcagtgatcgccaaagatcacacagcacgaagtggcagggacgcgatcctggaagaagggagtcaccaaggacccttccctcctaatcagcaaggtgctccccagcgccccccacccgcagttcccccagcacaccaaacgtcaagcagagggagaaacggggagagtttaagggaaggggcgtgtccccacgccggtctgggtcccaggggttgggtgaaacctgagatctaagccccgggagcgcggagaggagatggggggtggtctgcgaaagggtctcacccagctccaaagctactcatggcggcgggtggcggagcttcggggccgggggtggagccgggaccggctctgccgcttccggccctgggaggcgcccgggccgccgcgcccctgccccgccctccacagccacccctggagccggagggtcccaccgggtcacacatcccgggctgtggactcccgatcccaggttctttcggggtgggtgggggagagtggttgagaacatggactcgggagcgcgcctgcttgagttaaaaccccagttctgctaattcctagcagtgtacacaggtcgtccaacctctgcctcggtttcctcatttaaaaaatggggataataagagtacccggccgggcgcggtggctcatgcctgtaatcccagcactttgggaggccgaggcgggcagatcacctgaggtcaggagttcaagaccagcctggccaacgtggtgaaaccccgtctctactaaaaatacaaaacttagcctggcgtggtggctggcgcctgtaatcccagctacttgggaggctgaggcaggaaaatcattcgaactcgggaggcagaggttacagtgagctgagattgtgtcattgcactccagcctgggcaacgagaacaagactccgtctcaaaataaataaataaataagagtactcacacctcccgggggtagttgcgagggtgaaattggttaattattgggaagtgcctggagtatacacaacgctgtatttgtgtttgctatgtttgagcagagttgaaatgtgcagcttttgaccttggtcttgcccttgcgtggcctcctagcgctgaccacgcccactgcaccataactccagccttagggtgatttttgttttgttttgtttttgatacagggtgtggctctgtcgaccaaactggagtgcaatggcgtgatcatggctcactgaaacctcgaatttcctaggcttaagtgagcctcctgccgcagcctcccaagtagctgggtctacaagcgaaggccagcacgcccggctattttctttctctctctttttttttttgttttttgttttttgttttttgtttgtttgtttaacggagtcttgctctgtcagcaggctggagtgcagtggcgcgatctcagctcactgcaacctccgcctcccgggttgaagtgattctcctgcctcagcctcccgagtagctgggactacaggcacgcgccaccacgcccatttttgtattattaatagacagggggtttcaccatgttggccaggatggtctcgatctcttgaccttgtgatccacccgcctaggcctcccgaagtgctgggattacaggcgtgagccaccgcgccaggcctaatttattttcatttttagtaaagacgagggctcgctattttgcccagcctggtctcgaactcctgagctcaagcgatgattcccgcctccgcctcccaaactgctagaattatatagccttagtttttgactctgtccagatcttcagtatggccccgcctctggagttgaccacgcctgtcattctgagcctcccttctaaccctgtccctgagttgactcagttgcttgagaattgactgctacctcccgccaacgctccttctccggcccgccaggcattctgattacgtccattttcacgtattccttatgtgaataccttcgaggcctccaagttggctgcacctcttggcatttgaccacgcccctacggccccgcccaacctttaagccacgcccttttcaacctggcagtgccccccgattttgatgtcaaagcttctggaatctggaatgcctccacctggtctcagcctctgttactccgtaccccagattttaatttcgcccaggcgaacactgtggctgcacccttaaattcctcagactccctctttccttgtagaaactctgtggctgctgccttgacttcatccctgaaactcaacggggcctctcctgtaccttaataaccacgcccataagccaagctcctccctgacttcctcacccagtagacctgaccgtccagcttctaaaaactctggccacgcccctcaatattgactccgccctcccagaccttccactgttaccgtgccacctcaagattggtccctccaaggctctggcaccgtccccgcttttgaactagctggccccactctaggttacgacctcgtggcctggggcatgactacatttctcgaccatttcctccctatctctttctgcggcttgacgccgccccagtccttacccttcctttttggcgctacagttgctgctggaggatgtggtccggctgcgggggtcctcacggcgcaccgaggcgaggcgctctggtgacaagtagcggcggacactgctaaaagagagcacacaggtgggggcagagccttctaggccagcaggcgagtgccgtgagcaagcgagattctccctgcaccctctgctgctggagctcaggcaaacaaaccacctctgtctcccacgaggtcttggaagaggctgggggtcccggccttgtgccttacctgcgcccggaggtcgcctccttcttgggagaggatggggacgtggcatagccacccacgcgccgcgggggtcccgagccattaaggggcgtcctggtgggaaggcctttcaagagctgacacactggagggatggggttaggggacagaagagggtgagtataaggaccaggccccggtcctccccatcccacccctccagtctaacggggatacccgaggcagtggtgcctaagcgcggaggcgcccggcccttgggggtgccccgcgcgcgtagcgccgctccctgttcttcgcatgcccgcaggcgacgcagagcatccgccagcgccgcctttaggaccgccagctcgtcttcctgtaactgcagccgctgctccagcgccgacacgcggtcgtccacttccataccgctcgtgcccgacaaattgtcatctggaagacgggggagtgccggctgcagggccacccaggagctccagtgcccaaggggtccctcccgccttcctgggtctaagcggggggccagccacgcccctttcctgtcccgctacctggggctgggacacttggacatgagccaaggaagaggactctgaagggggaaggaaatccccacagctctccaacccatccgcacactcctctctgccacagcgcgctggccgtgtgaccttggggaagtcccttccctcttattttctaagagtctgtgaacccaggagcctctcgctctggctttaagatgctatgactaagacgtgaccaggcgcagtggctcacgcctgtaaccccagcactttgggaggccgaggcgggcgtatcacgaggtcaggagatcgagaccatcctggccaacatggtgaaaccccgtctctactaaaataaaattaaattaaaaataaaataaaatttaaaaaaaagccgggcgtggtggcgcgtgcctgtagtcccagctactccggaggctgagacgggaatcgcttgaacccggggggtcggaggttgccgtgagccaagatcgcgccactgcactccagcctggccacaaagcgagactccgtctcaaaaaaaaaaaaaagaaaaaagaaaaagaaaaaaaagattctttgattttatgactaagacgttaagtatctatgagtgataagagcatttgcaaaatgacaccaacctactcctaatgacactaaagttctagaattgatccccaacatcctccgacgaagattctgttatgaataccaacgtctcttcactgtttctaagactttccaagccaaaaggtcatgcctagcctccccgtttcccctcctctcctcaccctggggttcgaccctagagccagctgcaaggacagagcttcggcggcccctggcggcggacttgggggttgcaggcagcgcatggcagacccagaagacccaagggagatgcagaccggattgacaaccaaactcttccccagcaggcattcctcttttctgttccccttctttatttcgcctctgtaccccgcgccccagatttggctctccagcctatgggtgcagccaaaatgactccccgagtcgcccccccaaccccgctcattttcccaaagtgggaggggcggagaccgaagtggcccctctcccccttttcccgcagaatactcatacccagactcattgctgaccacaaccaaggaagccctggttcccagcctggtggaagtaaaggtggtagcttagacggggacagggcgtggagctcgcccctgccatcccgcgtccacaggccgcgcagctggccctctgggctccgcagtgcagccgccgctcctccctccttcccttcgtagcccaatcgcctgccgaggcttgcccgccctgccccccactcagcgcctcccaggtccggtgcctggacctgcagagggaggtgggagcctcctgaggtcagaaggagtgagccgtcaggacttagaactcgtaacagggggaaacctctaggggtcttgttggcatcacgttttgcagacgggaaactaaggaaggaggctagtaggagtgtgcagagacacgccaaagatcactcagcccgtaggtgggggctggggacccaatcacctcctgtgctcagcctggtcctacctaccattaattatacgaccagaaaaatggcatctgttactgtgagcttacatgtgccaggcactgctcacgcaaaacatttagcacgttcccggctcatgttgatgctcgataaatccagaataggattaactatttttatgatacctaatgcttttggcaactctagtagttgtagtagcataatccattttaggaggagaggaggaggaaggttactgaagcccagaaaggtgacgttacttgttacacggacacacagccgttcaatggaagaacccatactcaacaggaatggccaccctgtcattctggctcttagagggacagaggaggacaaaataagcattctgggtcccctgccaattccagtggtccctggcactagggtgtgtgcccagaggactgaacctccaaactgagttaatagaggtgctttcatcttgacccttctgccccacccagagaggccagctgcactgtcaggccttggccagcccatcctaccaacccccacacctccaccatccccatccctgtgactcaagccctccgctccctcctgaccatccccccatcctcagccttttcccagagaccaggcctcacttcccacttttccctcccaactcccctcttctcctatctcccctcacctgagcccgacacccacagtggtccttctggtatcacacccatttgtctagggagaagggatggtgctaatgcatgggagggccagggccagaggatttgggaggtatcctagaagcaaagtcctctggccgtccctttccagtcccacactctgccctcaactcaacaccaaatccacccccaccccctctgtctgtccccctgctatggagataggggagcattccagaagcttgaggggagagagaaagggcagagttccaggcccaatcgacccccaggccgttcccccttccaatcccaggttccttcgggttctgcccccttctctcctctccgtctagccacctcgggagtacagaaggatccaagtggatggggggctgggatctaggttttggggaccagggaccttgctcttgggtcagggtcctgctgagggagagaaaagggggatcttcagcaagggagggggttggggacttgcaaggaggaggctggggcaagaagagatgggtccagccttgggcggggccaaggtcggaactgaggaggggtctcaccgttgcagtatcgcagcagcgaggacgtgtcgtacaggccgcagaaggccgggccgcgctccgccatcgccccaccacagccaccgccggcccccccggtcccagcccgggcccggtccccccaaccaggccctgcctcccgttgccatagcaacgcccttcgttccagcatccccagctcagctcgcctggcatcaggcggccggcgccgggcccggcgctggggtcatccccaggatgcccagaaaggggggtcgggacaccgcctgccaagccccccaacacaatcctagggccaggattggctgcgcccggatccccctaggtaccgtctggtcccgcccacaaccggagtatagtctctctagacccccctcctcgcccgttcagaaccaatgagagcctgtcgcgcagggcccttcaccaatagggatgcagagggattggaaggggcagggtctttcctgctttcagcctgaagcgcagccccgagctccgggaggaggatggtgtggaggaagacactccactatccccaaaacctcttcagactttcattggattttccaaaagccccctccgtaaggccagggcccgaccttagagccccaaacccgcccagggagctcttgtttatgacatctaggcccacccccaggctcttagccccacccccagaatcttgcgggtgctaaagttttattcctacccacggaatcattagcaccgcccctgaaccgccaagggtttatagtatagtacttctccagagctctggacaggaccttcttataggattagctctggcctcggaatttaaatccctccccccgcggtctggtagtccctccctaactttccccaccgctctgtctgcggccccaggcccttagctccgcccttagagccctagcctcccacaaccgcattatccagtccgggctttggcacaggcccagttgtgaggcttggactagcccgcgtgtcaggcagagatggctcgaaagttgtgggggaaaaggggagggtacaaaacccgacaatggatttcaagaatattggaccgccttcctcaagtctccaacgacggtaaacacctagagtataggcaggagaagtgaagtccggagccgaaaaagaattccctctggacacagagatgaaaagtagaagttttggaagcagattgacctgggtttgaatcctgactcctccactttctggtttcgtgaccctaaagctccacttcctcatctggaaagtgggggctcataatcgcgcctgcctcattcattcattcaaaaatgtttactgagtgcctaacgggccaggctctgttctaggtgctgaagttttcggaatgaccaagtgaacctgtttcctctcatgtattgttcatttaatggaagaggtaaacaatcatacacaaaataaataacaatacctaacgtttaatcagcagtcactatgggcaaagcactcagttatcctcaccaaaagccctattttgttgttgttgttgttgttgtttgcttgtttgttttcgagacggagtctctctctgtcgcccaggatgtagtacagtggcacaatctcaactcactgcaacctccgcctcctgggttcaagcgattctcctgcctcagccttcagagtagctgggactacaggcgcacgccaccacgcccagctaatttttgtatttttagtagagatggggtttcaccatgttggccaggatggtctcgatctcttgacctcatgatcctcccgcctcgtcttcccaaagtgctgggattacaggcgtgagccaccgcgcccggcctatttttttatattttaaaaatattttgtggagaattgcttgagcctgggaggcggaggttgcagtgagccaagatcgtgccactgtactccagtctgggcaacagagctggagagcagaggcgcgatcttggctcactgcaatctccgcctcctgggttcaagcgattctcctgcctcagcctcccgagtacctaggactacaggtgcctgccaccacttccagctaatttttgtatttttagtagagacggggtttcaccatgttggccaggctggtttcaaacttctgaccttgtgatccgcccgcctcgacctctcaaagtgctgggatactttttccttttttttttttcttcttaagaaactgggtctcccactgttgctcaagctggagtgcagtaacatgattatagctctctccctctccctctccctctccctctccctcctctccctcctctccctcctctccctctctttccacggtctccctctgatgcagagctgaagctggactgtactgctgccatctcggctcactgcaacctccctgcctgattctcctgcctcagcctgccgagtgcctgcgattgcaggcgcacgccgccacgcctgactggttttcgtatttttttggtggagacggggttttgctgtgttggccgggctggtctccagctcctagccacgagtgatccaccagcctcggcttcccgaggtgccgggattgcagacggagtctcgttcactcagtgctcaatggtgcccaggctggaatgcagtggcgtgatctcggctcgctacaacttccacctcccagccgcctgccttggcctcccaaagtgccgagattgcagcctctgcccagccgccaccccatctgggaagtgaggagcgcctcttcccggccgccatcccatctaggaagtgaggagcgtctctgcccggccgcccatcgtctgagatgtggggagcgcctctgccctgccgccccgtctgggatgtgaggagcgtctctgcccggccgccccgtctgagaagtgaggagcccctccgcccagcagccgcaccgtctgagaagtgaggagtccctccgcccggcagccaccccgtctgggaagtgaggagcgtctccgccaggccagccgccccgtctgggagggaggtgggagtcagccccccgcccggccagccgccccgtccgggagggaggtgggggggtcagccccccgcccggccagccgccccgtccgggagggaggtgggggggtcagccccccgcccggccagccgccccgtccaggaggtgaggggcgcctctgcccggctgcccctactgggaagtgaggagcccctctgcctggccagccgcaccgtctgggagggaggtgggggtcagccccccgcccggccagccgccccgtccgggagggaggtgggggggtcagccccccgcccggccagccgccccgtccgggagggaggtgggggggtcagccccccgcccggccagccgccccgtccaggaggtgaggggcgcctctgcccggctgcccctactgggaagtgaggagcccctctgcccggccaccaccccgtctgggaggtgtaccaaacagctcattgagaacgggccatgatgacaatggcggttttgtggaatagaaaggggggaaaggtggggaaaagattgagaaatcggatggttgccgtgtctgtgtagaaagaggtagacatgggagacttttcattttgttctgtactaagaaaaattcttcttccttgggatcctgttgatctgtgaccttgcccccaaccctgtgctctctgaaacatgtgctgtgtccactcagggttgaatggattaagggtggtgcaagatgtgctttgttaaacagatgcttgaaggcagcatgctccttaagagtcatcaccactccctaatctcaagtacccagggacacaaacactgcggaaggccgcagggtcctctgcctaggaaaaccagagacctctgttcacttgtttatctgctgaccttccctccactattgtcctgtgaccctgccaaatccccctctgcgagaaacacccaagaatgatcaattaaaaaaaaaaaagaaaaaaaaatattttgtacagaggagctcttgctatattgccaaagctggtctcaaactcctggcctcaagtgatccttcggcctgggcctgtcaaagtgccggaataatagatgtgtctcactcactcttgccctggctgtaatgcagtggcatgatcttggctcactgcaacctccacctcccagattcaagcgattctcgtgcctcagcctccccagcagctgggattacaagtgtgcaccaccatgcctggctaatttttgtatttttagtagacacagggtttcaccataatggccaagctggtctctaactcctgacctaaagtgatcctcccgtctcagcctcccaaaatgttaggattacaggtgtgagccaaccgcacccagtaaaagttcaattttaatcaccattttagagatgatgatacagaaacagtgtggcagtgactcaacctgttaatccccagcactttcaaaggccaaagaagggggattgtaggggtgcgagatcagcctgggcaacaaagcaagaccccgtggctacaaaacaaaatttctttctttttttttttttcttttgagatagagtcttgctcttgtcgcccaggctggagtgcaacggcacgatcttggctcactgcaatctccgcttcccaggttcaagcaattctccagccttagcctcccatgtagctgtgattacaggcacccaccaccacgcccggctaatttttttgtatttttatttttatttatttatttttgagatgaagtctcgctctgttgcccaggctggagtgcagtggcatgatctcaactcacgacaacctccgcctcccgggctcaagcaattctcctgcctcagcctcccaagtagctgggactacaggctcgcgccacaatgcctggctaatttttgtatttttagtagagacgagggttcactatgttggccacgctggtctggaactcctgacctcatgatccgcccacaccggcctcccaaagtgctgggattacaggtgtgggccatcgcacccggccaaaacaaaatttttcatcctcctgacatggtggtgcacgcctgtagttccagctacttggaaggctgaggtgggaggatcacttgaacccaggaggtcgagactgcagcaagctatgatcatgccactgcactccagcctgggcaacagagcaagaaggtgtacagacaggataatatagtaaaaaaagggagcaggaggctcatttagagaccctagatccagggcagttacctctgaggaaatgacatttgagctgacatgtgaaaaataagaagggttgggcacggtggctcatgcctgtaatcccagcagtttgggaggccgaggcaggcagatcacctgaggtcaggagttcgagaccagcctggccaacacggtgaaaccttgtttctactaaaaatacaaaaattagctaggcatagtggcatgcacttgtaatcccagctacttgggaggctgtggcaggagaattgcttgaaccagggaggtgaaggttgcagtgagcagagaccacaccattgcactccagcctgggtgacagaatgagacttcatctcacaaaaaaagaaagaacaaaaaaaaaaaaaaaaagaaagaaagaaaaagaaaaacaagaaggaagcagttatgcctggagttgggaggcaggggatttctaggcagaggaaacagcaagtgcaaaagtcccgaggttggtttgagtttagcatattcctggggcaaccagaaggttgatgacgatgaagctgtggagagataggggaagggggggatgcgaggccagggaggctatgggccttccatatcttgcagggcctcaaaggctgggggaagactttggcagtttgtcactgtatcctccacaagccacagtgaggccacagatataaattatatatgagtggccaggccacgcctgtaatcccagcattttgggaggccgaggtgggtggatcacttgaggtcaggagttccagaccagcctggccaatatggcgaaaccctatctctactaaaaatacaaaaattagccaggcatagtggagcatgcctgtaatcccagctattcagaaggctgagacaggagaattgcttgaaccctggaggcagaggttgcactgagccaagatggtgcccctggactccagcctgggcgacagagcaacactctgtctcaaaaaagaaaaaaaaattatacgtgagtacaatgcctagcacacaatgaggcatcaatgatgggccgggcacagtggcatgtgtttgtagtcccagctacttgagaggctaaggtgggaggatctgttgagctcacgagtttgggctgtagtccactatggcaattaggtgtctgcactcagttcagcattaatacggtaccccttggagtgggggaccaccagttgcttaaggaggggtgaactggcccaggtcagaaagggaatagggcaaaactcccatgctgatcagtagtgggatcccgcctgtgaatagccactgcactccagtctgggcaacatggcgagaacctatctcataaaaagtaaaaaacaggggctgggtgcagtggctcatgcctgtaatcctaacactttgggaggctgaggcaggtggatcacgaggtcaggagatcaagaccagcctggccaacatagtgaaaacccatcctaaaaatacaaaaaattagcagggcgtggtggtatgtgcctgtaatcccagctactcaggaggcagaggcagaagaatcgcttgaaccagggaggtggaggttgcagtgagtggagattgcgccactgcactccagcctgggcgacagagcaagacatcatctaaaaaaaacaaaaaaacaaaagtaataaataggactgggtatggtggctcacatctatactttcagcactttgggaggcctaagcccagaaggatcacttgaggccaggaatttgagaccagcctaggcaatatagcgagagctcctctctacaaaatatttaaaaattagctgggcttactttttttttttttttttttttttttttttgagatggagttttgctcttgttgcccaggctggagtgcaatggtgcaatctctgctcactgcaatctccacctcctgggtccaagcgattcacctgcctcagcctcccaagtagctgggattacaggcacgtgcaaccatgctcggctaatttttgtatttttagtagagacgggggttttactatgttggccaggctgctctcgaactgctgacctcaggtggtccacccaccttggcctctcaaagtgctgggattataagcgtgagccaccgtgcctggccagttgggcttacttcttgttgaacaggtctaaaaaaagaaaaataggcaggcatggtagctcatgcatgtagctccagttacttgggaggctgaggctggaggatcacttgagcccaggagttcgaggctgttgtgagctaggatggcaccactgcactccattctgggtggcatagtgaaaccccatctttttttttgagacggagtctcgctctgtctccgaggctggagtgcagtggcgcgatctcggctcactacaagctccgcctcccgggttcccgccattctcctgcctcagcctctcgagtagctgggactacaggcgccggccaccgcgcccggctaatttgttttttgtagtttttagtagagacagggtttcaccgtgttagccaggatggtctcgatttcctgacctcgtgatccacccgcctcggcctcccaaagtgagaccgagcgcccggccgtgagacccccatctcttaaaaaataataaataaataggccgggtgcggtggctcacgcctgtaatcccagcactttgggaggccgaggcgggcagatcacgagggcaggagatcgagactatcctggctaacacggtgaaatcccgtctttactaaaaaaaaaaaaaatacaaaaaattagccgggtgtggtggcgggccctgtagtcccagctattcgggaggctgaggcaggagaatggcgtgaacccaggaggcggagcttgcagtgagccgagattgcaccactgcactccagcctgggcgatacagcgagactctgtctcaaataaataaataaataaataaataaataaataaataaataaaataaacaaataaaaaatcaatgatgggttcaaagtgatgaccaaaatagccgtgggtccttatcctcccacgatcaccgctaattgtgttactggtagaaacaacgcgggaggttttctgccgcccaaatcaccactaattgtgttactgatagaaacaacgcaggaggttttctgccgcccaaatcacgcttctcccacccgccaatcctcttgagctcagattctaggagaggggaagtcagacacccagatacagaattctgaagcaggctgcaaagtgttaagggctgttactggggtgtcccgagaggaccgtggaggcccaggggaattcagatccatgggctccatatggtgcgggaggaggagggaggagagccaggcacagggatttagcttgatgagttatgggaggtgggagatgacacacaaagatgagtcagacctagtccttgcccttgaggggctcccagcctcagtgcagggaccactgtcagggtccatgcgagctaagtgatcttggcttggtttttcctcctctgcaaaacgggagtcatcccagcccccacttcccaggggagcagagcaggttgaatgggctcatgctgataaagtgcccagcacagtggtttgggggtacaggtaacggagctggtttgatgacaagtgctttcgcagggaggtgtcaaggatgtgggagataggcgtggggagagggcggctctgtctgaggagggggtgcgggcaggcagggctcacagtctctgtctttctgcctccaggtttccttctccctaaggcttttcgctctcatctctatctctgtttttcttcatgtttctgtatagaaattggatttcatcctagtactttgggaggccgaggcaggcggatcacctgaggtcaggagttcgagaccagcctgatcaacatgcagaaaccccgtctctactaaaaatacaaaattgctgggcgtggtggctcaagcctggaatcccagcacttctggaggccaaggcgggcggatcacaaggtcaggagatcaagaccatcctggccaacacggtgaaacactgtctctattaaaaatacaaaaaattagccgggtgtggtggagggcacctatagtcccagctactcgggaggctgagcaggagaatggcatgaacccggaaggcggagcttgcagtgagccgagattgcgccactgcactcaggagacagagcgagaccctgtctcaaaaaaaaaaaaaaaaagaaaaagacaaaaagaaattagctgggcctggtggcgcatgcctgtaatcccagctacttgggaggctgaggcaggagaatttcttgaacccaggaggcagatggtgagctgagatcgcaccattgcactccagcctgggcaacaagagtgagactctgtcttaaaaaaaaagaaaagaaaaagaaattggatttcaaagttaactggccaagtgtggtggctcatgcctgtaatcccagcactttgggaggccgaggcaggcagatcacctgaggtcaggagtttgagaccagcctggccaacatggtgaaaccccgtctctactaaaaatacaaaaattagcctgatgtggtggtgggcacctgtaatccttgctactggggaggatgaggcaagagaattgcttgaacccaggaggtggaggttgtagtaagccaagattgcaccactgcattcagtgagccaagatcgtgcctatgcacgccagccagggcaatagaatgagactccttctcaaaagacaacccgggtcctgatttcaacacctatgagacatgtcaccctgatcaagttacttcccttctctgggcctcagtttccctatccagaaaatggggataatataacacctctgctataggtctgttatgagaagggacatatagatgtgtaaaatatccaatatggtggccattagtattattattactgatactaatctcagactctgtttttctctcagcatctcttttttacatttatttatttatttatttatttatttacttgagatggagtctcactctgtcgtccaggctggagtgcagtggtgtgatctcggctcactacaaactctgcctcccaggttcaagcaattctctagcctcaggcttcccagtacctgggattacaagcccgccaccacgcccggctaattttttgtatttttagtagagacagggttttaccatcttggccaggctggtcttaaactcctgacctcatgatccaccagcctcggcctcccaaagtgctgggattacaggcgtgagccaccgcacctggctactttctttcattctttcattttttgtttgtttgttttttgagacagaatctcgctctattgcccaggttggagtgcagtggtgcaatcatggcccacagcagcctcaacctcttaggctcaagtgatcctcctgcctcacccttctgagtatctgggactacacgaacgagcagccgtgctttgctaatttttaaaaattttttttgtagagacagagtctcactatgttgcccaggctggtctcgaactccggggctcaagcgatcctcccatcccagcctcccaaagtgctgggattacaggtgtgagccaccatgcctggcctctttctttgtgtttctctctctacgtctcattctgtcagctcgtccccctacttgggtttatgtttgagctgggagcttcacaaagccagagcaagagctgtcccagtcaccagggtccccagcattgccaagctcatagcctggcatgtaacaaacgtccagtaaaatgcattgaactctgacctctgctgaaccaatgttgggcaatgctggagacacagcagtgactgagacagccccagtcctgccctcatagggcacatagtgttgggcacggtggctcacgcctataatcccagcactttgggaaactgaggcggtggatctctttttttttttttttttttttttgagatggagttttgctcttgttgcccaggctggagtgcagtggcgcgatctcggctcaccacaacctccgcctcctgggttcaagtgattctcctgtatcagcctcctgagtagctgggattgtaggcgcacgccaccacacccagctaattttttgtatttttagtagagacagggtttcatcatcttggccaggctggtctcgaactcctgatctcaggtgatccacccacctcggcctcccaaagcgctaggattacaggtgtgagccactgcacccggactggatctctctctctctttttttttttttttgagatagagtcttgcactcactatcgcccaggctggagtgcagtggtgcgatctcggctcactgcaagctctgcctcctgggttcatgccattctcctgcctcagcctccccagcaggtgggactacaggcgcccgccaccacgcccagctaattttttcatatttttagtagagagagggtttcactgtgttagccaggatggtctcaatctcctgacctcgtgatccgcccacctcggcctcccaaagtgctgggattacaggcgtcagccactgcgcccagccaactggatctcttttttatgttttgttttattttgttttgagacagggtctcactgtcacccaggctggagtgcagtggcatcatcttggctcactgtagcctggacctccggggctcaagcaatcctcccatctcagcctcccaactagctgggactacaggcatgcaccaccacgccattaatttttcgtattttttgtagagatagggtttcacgatgttgcccaggctggtctccaactcctgggctcaagcaatccacccaccttggcctcccaaagtgctgggattacagctgtgagctacaactcctagccaagaggctttctttaggacaggagttcaagaccagcctgggcaacagagtgagaccccatctctaaaaaaaaaataaaaatatagccgagcgtggtggaggccacctgtaaacccagccactcagcaggctgaggcatgagaatcgcgtgaacccaggaagcagaggttgcagtaagccgagatcgtgcactctagcctgggtgacagagcaaaatcccatctcaaaaaatcataataattaaacaaacaaataaataaattagctgcactttgtggcctgtgcctgtagtcctagctactggggaggctgaggtgggaggatcattgagcccaggaggtcaaagctgcagtgagccatgattgtatcactccactccagtctggacgacagagcaagacgctgctcgaaaaaaaaaaaaaaaatagcctagagggaaaggcctaggtttgcctgctctccctgaggcttgaaaaggggcttaggggcttgctgagcactaccagggagcaatcagggacccctacaagtttgaatctttcaattgatccttcccagggctggcggtttacactgggttttggagccgtctctagggccccagctgagagcccctctgctggcctctgaggccctggagcccccacctccccctcccgcatgagattatgtcaacatagcccagacgcttctggccaggacaatatttgccctcaggatctggggaggtcgctatggagatgtgccctcccagactaggctggaagacgccgaggggagccatgcgtctctgtctcacggagtctgacttaatccctgttctcttctgggatataagtccctctctctgttttcgtccctctctgttcccctcctttccctttccttcccctctcctccccttccctctccctgtctctctctccttttttttttttttttttttttttgagatagggtctcactctgtcacccaggctggagtgtagtggcgtgacctccgcctcccgggctcaagccatcctcccacctcagcctccccagcagctgggaccacaggtgcgtgccaccatgcccagctaatatttttttgtagagatgcagttttgccacattgttcaggctggtctctaactcctgagctcaagcgatctgtctgcctcatcctgcgatctcggatcagtgcaacctccacctcccgggttcaagtgattctcctgtctcagcctcccgagtagctgggattacaggtgcccgccaccacacccggctaattttttaatttttagtagagacgaggtttcaccatgttggccaggctggtctcgaactcctgacctcaggtgatccacctgcctcggcctcccaaagtgctggtattacaggtgtgagccaccacgcccagccttgtttcttaggtcttatctctctgggtgtcctctctgtccctctttctctgggtccccatctctgtgtttctgtctctccgtgtctctgtctctccttgggtttcatgtctgtgtctctctttgggtctctatattttttgtttgtttctccaggcctctgtctcgggatctctgtctcttcccatctctggactcccctctctctggttcacatccgtttgtctgtgtgtgcctggacccacatctctcgccaggtctctgtctcagctctgctgtctctctcactctctgtatctcttctctttctgtgtatgtgtgtgtctctgtgtatctgtcattcaggcctcatctctctgcagtcctgaatctccgagatggagagggggctgtcacagcttcccattcctggtctctgtccccacggggtgccccctctccccatctctctctgcctcatttctctggcaccatctgccagcaccccaggcccccgcctgctccccgcagggtctgcttagccaggcagccccatgtggggagacacaggccttgcagcttccaccccacccttgcatcctggacaggggcactgcctggtcattgctggagggccgggggaggcaggagtgcaggagaccagagccaggagaccagggaccaggggcaatggatagaaacagacgcaatcccagagaggagatggaaaaaggggaagagaaaggagaaactttaaagactggcaaaatgaggctaatccagagggagagagagagagtgaaagaacccagcagagaggcagaatgaaacatggaaaaagagaagagaaaagccttcccaacagacaggagaggaagacagaggcaaactgagtgtgggctcagagaaaaggagtaaagaggcagggcacagtggtgcacacctgtaatcccagcactttgggaggctgaggcagatgaatcacttgagcccagaagttcaagaccagcctggacaacatagcgagacaccacctctacaaaaagtacaaaaattggctgggcaccatggttcacacctgtaatcccagcactttgagaggccaaggcaggtgaatcacctgaggccaggagttcgagaccagcctggccaacatggtgaaatcccatctctacgaaaaatacaaaattagttgggcatggtaggcacatgctgtaatcccagatacctgggaggctgaggcacgagaatctcttgaacccgggaagtggaggttgcagtgagccgagatggcaccactacactccagcctgggtgacagagacaaactccatctcaaaaaaacaaaaacaaacaaaccaaaaggctggacacgtaatcccagcactttgggaagccgaggcgggctgatcatgaggtcaggagtttgagaccagcctggccaacacagtgaaacgccgtctctactaaaaaaaatacaaagaattagctaggcatggtggcaggcgcctgtaatcccagctacttgggaggctgaggcaggagaatcgcttgaacctgggaggtggaggttgcagtgagctgagatcgcaccagggaactccagcccgggcgacagtgtgagactccgtctcaaacaacaacaacaacaaaaattagccaggtatggtggcatgcgtctgtggtcccaactactcaggaggctgaggtgggaggattgcttgaacccaggtaggggggtcgaggctgcgttaagctgtgatcactctactgtgctccagcctaggcaacagagggagaacctgtctcaaaagaaaagaagaggagtgaggagatatttggatgaaagagagaaacaaggtaggatggacagaaagagagagagacattgggtcagggaaggtgggagagagatgggagaggcagaggggttgtaggagaggttttgctaaacaagactagagacggaaaatggagatccatcggggtgggtgtggaaaggctggggaatgaggctcctctggttctgagtcccctgttgcgggagtggggcgtggaactcagctgtctgggaggggctgagttgggatggtgcatgctgtttctcggcctgaagttttcagaagccatgagcaacgcagctggagggagcctgtgcagccagcccctttgcagacgctgggagacaacagaggaccccaggagggctgaggtgggcagaagaccaggcatctacccacccctgactcctcatcctgtcttcagaagtctcactctgatgcccagcgctgtggtgcagtctcagctcactgcaatctctgcctcccaggttcaagtgattctcccacctcaatctcccgagcagctgggattacaggcacgcgccactacacccagctaacttttgtattttagtagaaatggagtttcaccatgttggtcaggctggtctcgaactcctgacctcggtctcccaaagtgctgggattacaggcgtgagccacggcacctagcctctcctcttttcttttcccttccctcccctcccctcccctgcccttcttttcttttgagacagggtctccctctgttgccgaggctggagtatagtggtatgatcacagctcactgcagcctcgaccccctccccgggctcaagcaattttcactcagcctttccatctcgcagtttcttttctggattttttttttttttttttttttttagatggagtcttgctctgtcgcccaggctggagtgcagtggcgcgatctcagctcactgcaagctccacctcccgggttcacgccattctcctgcctcagcctcctgagtagctgggactacaggcgcccgccaccacacccggctaattttttgttttttagtagagacggggtttcaccgtgttagctaggatggtctcgatctcctgacctcgtgatccacccgcctcggcctcccaaagtgttgggattacaggcgtgagctaccgcaccaggccttttctggttatttatttatttaattttttgagacggagtctcgctctgttgcccaggctggagtgcagtggcgcgatctcggctcactgcaagctctgcctcccgggttcatgctattctcctgcctctgcctcccaagtagctgggactacaggcgcccaccaccatgcctggctaattttttgtatttttagtagagacggggtttcaccgtgttagctaggatggtctcgatctcctgacctcatgatccacccgcctcggcctcccaaagtgctgggattacaggcgtgagccaccgcgcccggccctggttatttttttgagacagtctggctctgtcgcccaggctggagtgcagaggcacgatctcagctcactgctacctctgcctcccgggttcaagcgattctcctgcctcagcctcccgagtagctaggactacaggcgcccaccaccacgcccggctaatttttgtatttttagtagagccggggtttcgtcatgttggccaggctggtctccaacttgtgacctcaggtgatccagccacctcggcctcccagggctctggaattacaggtgtgacccaccgcgcctctctgtctctctccggctcagtccctgttttctctttcttggcttctctccctcaccccctcttatctgtgtctgtgttgtctgtttgtctctgtgtgtgtttctctctgtcgctgtctctctctgtctctctctccccctctctctctctctctctctgtttcttctagtctctctcttgtagtctctctctcttggtctttctcttcttgcttttttttttttttttttttttttttgagacagagtcttgctctgtcgcccaggctggagtttagtggcacaatctcagttcactgcaacctccgcctcctaggttcaagcaattatcctgcctcagtctccccaacagctgggattacaggtgtgcaccaccacacccagttaatttttgtattttagtagagacatggtttcactatgttgtccaggctggtctcaaactcttgacctcaggtgatccgcccgccttggcctcccaaagtgttgggattacaggcatgagccactgtgtctggcctctcttcttgtctttatctgcctcccactctagatctttcttggtccttgatttctttttttttttttttttttttttttttgagacaggatctcactctgtcacccaggctggagtgcagttacgcgatcatcacagctcactgcagcctcaatttcctgagctcaagcaaatcctcctgcctcagccatccaagtagctgggaccacaggcgcaccaccaccatgcctggctaattaaaaaaaaaaatgttgagaggccgggcgcggtggctcacgcctgtaatcccagcactttggaaagccgagatgggcagatcacctgcagtcaggagttcgaaaccagccatggctaacatggtgaaaccccatttctactaagaatacaaaaacttagctgggcatggtggtgcgcacctgtaatcccagctacttgggaggcggaggcaggagaatcacttgaacccaggaggcagatgttgccgtgagccgagatcgtgccattgcactccagcttgggcaacaagagcaaaactccatctcaaaaaaaaaaaaaaattggccaggcgcagtggctcatgcctataatcccagcactgtgggaggctgaggcaggccaatcacctgaagtcaggagttcaagaccagcctgaccaatttggtgaaaacccaactctgctaaaagtacaaaaaaaaaaaaatagccaggcatggtggcaggtgcctgtaatcccagcctctcgggaggctgaggcaggagaatcacttgaacctggctcactgcaatctctgccctagcctgggcgacagagtgaaactctgtctcaaaaaaaacaaaaattttgtttttaattctagatgacgtgttgatagatgcagcaaaccaccatggcatatgcatacctatgtaacaaacctgtacgttcagcacatgtatcccagaacttaaggtaaatttttttttttaattggaaaactgaaaaaaaaaaatattttttttttagagacgggatctggctatgttgcccaggctggtctccaactcctgggcttaagtgatcctcccatgttggcctcccaaagtgctgggattacaggtgtaagccaccacactaggctcttagctccttttcctgtttcacaccaccagctcatttcctctccactgcttccccctccctgccagcctctcccttccccctctacagcctccccacccctcactgccttcctctgtggagtgacctcaggccctcattggggccaaggagagactcccttccaacctaaacttctcccaaggtgctgggcaatctcagacccccttccctctccactccaggacaggagcctttcccaggacccggagggcaccaggaatgtggggcagagagcggggaggcagcctaagtccaggaagcgagaaccctcgcctcccccgagacttgtctccttccagcctctggtgcagacctcatgccaccccttactccctgtccctcctggggcctctgggccttaatttctcctctacaaaatgggcagactcgcctctgtcccacttagagtcccaggggagtgcatgctcacaaatgtccattgtatgattaatgtgcaggaattggagtttgtattaacaggagatgagagctgggagctgggactgggctctgagcctgtcccccacccccagtcacgtacagatgttccccatatttagggcaaaggaacagactggaagtagagacagcagagaatgtgtgtgattcactggcgactgtcatgatgagaccatgtgaggctatgggttagtgtgcaattgtgacacgatggtgtgtgtgaccctgtgtgcacctgtgtgactgtgcgtgactgtgggaggtgggattgcagggtgtgacaagtcactgtgacgtgcacagctatgggacagtgaggttgtgtgcgtgacatgtatatgactgtatgtgacttgtgaatatgggtgagactaagggagagttgtgagtctgtatgaccatgtcactcagtgtgaccgtgggggtgagggtgacggtgtgagagtgtttgcctcatgacagttggggaatgtgtgttgttggaatgtgactgaggactctgtgggtgactgtgaagtgtgtgagtgtgtgacggtgttaatgggtgtggttgcatgacattgtgtgtgactttcagcttgtgtcataaaaagactgtataataagacattaaaaaaaaaaaaggccaggcgcggtggctcatgcctgtaatcccagcactttgggaggccgagacgggtggatcacgagatcaggagatcgagaccatcctggctaacacggtgaaaccccgtctctactaaaaatacaaaaaattagccgggcatggtggcgggcacctgtactcccagctactcgggaggctgaagcaggagaatggcgtgaacctgggaggcgaggcttgcagtgagctgagatcacgccactgcactccagcctgagtgacacagcaagactctgtctcaaaaaaaaaaaagagtcgggcacagtggctcatgcctgtgattccagcactttgggaggctgaggcaggcagatcacctgaagtcaggaatttgagaccagcctggccaacatagtgaaaccccatctcttctaaaaaaaaaaaaaaaaaaaaaagccagccacagtggctcacgcctgtaatcccagcactttgggagactgaggcgggaggatcacgaggtcaggagttcaagaccagcctggccaacatggtgaaaacttgtctctactaaaaatacaaaaattagctgggcatggtggcgcgtgcctgtaatcccagctacccgggaggctgaggcaggataattgcttgaaccaggacccgggaggtggagattgcagtgagccaagatcacgccactgtactccagcctgggctacagagggagactcggccaaaaaaaaaaaaaaaattattagccgggcatggttgcgggcgcctgtaatcccagctacttgggaggctaagacaggagaactgcttgaacctgggaagcagaggttccagtgagctgagatcgtgccactgcactccagcctgggcgacagagtgagactccatcccaagaaagaaagagagaaagggagaaagggaggaagggaggggggaggggagaggggagaggggagaggaaaaggaaaggaaagtcctttgcagcaacacagatgcagctggaggccagtatcctaagtgaattaacaaaggaacagaaatccaaacaccagatgctcttacttataagtgggagctgagcactgggtacacatggacaccaacatgcgaacaacagacactggggactcctagagggggcagggaaggagacaagggttaaaaaactacccgttgggtgccatgctcactacctggatgatgggatcatttatacccccaacctccgcatcgtgcaatacacccccgtgacaaacctgcacatgtgccccctgaatctaaaataaaagttaaggccaggcgcggtggttcatacctgtaatcccagcactttgggaggccaaggcgggaggatcacttgaggccaggagttggagaacaatatggccaacatggtgaaacctcatctctactaaaaatataaaaatcagccaggcgtggtggcatacacctgtagtcccagctactctggtggttgaggcatgagaatcgcctgaacccaagaggcagaggttgccaagttggcgccactgcactccagcctgggtgacagagtgagaccctgtctagaaaaaataataaataaaatgaattaaaataaatgaataaataaataaataaaagttgaggctgggtgtgatggcacatccctgtagtcccagcactttgggaggccgaggcaggaggattgcttgaggccaagagttggagaccagcatggccaacatggtgaaaccccatctctactaaaaatacaaaaattttagctgggtgtggtggcacacacctgtagtcccagctactcgggaggctgaggcaggagaatctcctgaaccctggaggcggaggttgaagtgagccaagatggcgccactgcactccatcctgggtgacagagtgagaccctgtctcaaaaaaaaaaaagttgaaattattttttaataaaatggtggggcatggtggctcatgcccatagtcccagctagtcaagaggctgagttaagaggatcccttgagcccaggaagtggaggctgcagtgagctataattgttccagtgcactccactctcataaataaataaataaataaaatgtaaaaaggattgtatgggccgggtgtggtggctgtcgcctgtaatcccaccactttggaaggccaagacatgtggaacacctgaggtcaggagtttgagaccagcctgggcaacatggtgaaacaccgtctctactaaaaatacaaaaattagtcggttgtggtggtgtgtgcctggaatcccagctacttgggaggctgcggtgggagaattgcttgaacccaggaggcggaggttgcagtgagctgagatcatgcttctgtactccagcctcagcaacagaggaagactctgtctcaaaaaaaaaaaattctatgtctgcgagtaaccacacaactgcatactgcgtatatttatttcatgacaatccttccttgaacccctgctcttaacgattttggggacccagtggtgacccagatgtcctggctctaccctcctgggccacacaggctagcagggcaacagtgtttgtgatgaaacccggtgattgcgtgaatgtgtgggtgattgacagtgttgttggaactgtgagacactgtgagcgttactgtgtgtgtgcaggagtccatagccctgggtacatgactgtgtgtcacagtggatgactgtccacctgtgagtgagagactgtggctgtctgggtgtgaccatgggactgtatgggtgtgactgaatgtgtgactgtgtgagtaacagcttgtgaggttctgtgactgtgcctttccatggctcagcctatgggattgtgtgtgacactgcatgtttgattgagtgactgaggctctgggaatgagtggcggtgggggcgggtacctgtgggtgggacagcatgagagattgtacacacttggtgcaggggtcctcaggacgataaggacaattcagtaactgccctccctcatgaccttgatgactgccccctgctcggctctctgccccagagctccccgcttccgttccctgtcccgccttggccccgccccctcccatcaccccgggctgccagcgcctgtcacctctcccagagccgagacaaggcagttggaggcagcggtggcaggggctgcaggagcaagtgaccaggagcaggactggggacaggtgagggctccccaatcccagcccattctccctgcccccccttgacctctcaagtctctggcactctccctctctgcttctctgccctgcctttgtctctctgtctctgtgcccaccaccatctctgctcatctctgtctcttgatgtctctgtctgcgtgtttccatctctggttagctgctagataacttctctttcccctgctctgtctccctccacgtctctgcctcttctttgtctcctagcccacatctgcgtctctttctctgtttgtttttctctggtctctggctgggggtctcattctgtccctccgtctctgcgcctctcagtctttacatttctgtctcttgtgtctgtgacgccgttgtctgtccttctgaggctcgacctgagatcctctctgcttccgtctttctctacgtggagccgcgggggcgcgggtgagtgggtgtcgggcgttagaccgatttccaggcatctgcacatctaaccccggatctgtcgcttctctagtccctaagtatttggatgctgggaaagggttgttccacttactctgggctttatctacccccagcggggaaagttttgtaaggtcaggttcctatgtgtgctagaaaaccctttgggcttggagagtgggagctcggatgggcgtttcaagttctccaccaggctgtgggaactcagatgggcgtttcaagtaccccactagggggtactgaaaaccttcaagtttttcagttccccatagaaaaggggtctaggctgacggtttctaccccctcctctccaaggcggtccccgggttcccaggagtctgtaggtccagacttcggtgacactgacacttccgcccagcgtagctctagggcaaccgcccgctcagcaaacaccccccccttccacctttgctgccccaacaacagtcaggggaggccggggaatcacttaaggggccccgcccaccaccggagttccacccactccgcgtgcctctccctccccccagatcatcacgcctgggagttgcgggagcgggtgcgctgcctcggagtcccgcgtgtatacggctccccagccgtctgcccctgtgtgtgaatccctgaggcggggtgacgctggggttggagtaggagggcagaggtgctgaccttgccctgggaccctccaggcctgatcgcccctgcacgaaccagacccttcgccgccctcacgatgactacctctccgatcctgcagctgctgctgcggctctcactgtgcgggctgctgctccagagggcggaggtgaggaagcgaggagccagaggagctccaggcttggagggaggtatggggacggttttagggcttccgtcgtcagggcgctgtcgctcacgcctgtaatcccagcactttgggaggccgaagcgggtggatcacttgaggccaggagttcgagaccagcctggccaacatggtgaaactccctctctactaaaaaaaatacaaaaattagccgggcgtggtggcggccgcctgtaatcccagctactcggaaggctgaggcaggagaatcgcttgagcccgggaggcagaggttgcggtgagccgagatcgcgccactgcactctaacttgggtgacagagtgagactctgtctcggggtgggggggggaggcttccctcagcgcaaagagagtttcaagactgtcccgcttgcccagattcaagttgttgggtggtggtttgtttgtttgtttcgagacggagtctcactctgtcacccaggctgagatgcagtggcatgatctcggctcactacaacctccgtctcccgggttcaagcgattctcccgcctcagcctctcgagtagctgggactacaggcgcactccaccatgcctggctaatttttggatttttagtagagacggggatttcaccatgttggtcaggctggtctcgaactcctggcctcaagtgatccacccgcttcggcctcccaaagtgctgggattacaggcgtgagccaccgcgcccgggcccagattcgagttttgattatcgtttccactcccttttcttcccccaacaagtcctcctgataatttccagccaccccctccccaattttcttgaaggttttcagtctcccatagcaactccagtgggtggcttccaggcaccccaccccaagacttggaactggtttccaagctacccaagactcccgaacaacacgcaacagaccctcaaagtctctctggggcgcttctgggccacatggacctagcagcctgggagcgggggtcggtctgggggggtcctcccttctttcttttcctagacaggctctaaggggcagacggcgggggagctgtaccagcgctgggaacggtaccgcagggagtgccaggagaccttggcagccgcggaaccgccttcaggtgtgaccaggagggctggggacgcggggaggacctgaggctgagaggggtgggcttgggatgggccttgggctgacgggcggggaagaaatctcggggcgctgtgggctggagaggcccggggactgacctgagcatggtgggaactggggcgggaccacggttcctgggggaggcctgggaggaagcttgaaatgggaggagccttgggcggggcctgcacagaaataaaccttgaagggggcggggtttgggatggagactgggaagggcccttccgggtgggacgatctggggcggggacttgtttggtgggaggagcccagagtggggccgggaggaggggcggagctttgaggctggtgggaggagcttgtggccgagccgggacggaacgccctccgagtgggcggggctagagccgggcttggtgtggccggcggagaagcacttggcccactgcggagaagcacttggcccactgcgcagtagcacttggcccactgcgcagtaggtccactgggcacctggcccccgtgcccacccccaggcctcgcctgtaacgggtccttcgatatgtacgtctgctgggactatgctgcacccaatgccactgcccgtgcgtcctgcccctggtacctgccctggcaccaccatggtgaggtgctccctgggcccggagccctccccagacacaaacaactgctaacctttgcccccagacacctacatccgagtcccacagctcacctgcacccctctcctgctcctctttgccccctactcctttccggcaggctgggtttctcctgtctgtccaaccctgcctatctcacataacgcagcttctctgtctccgtatctctttctatttatttatttggagacggagtctcgctctatcgcccaggctggagtgcagtgggatgaactcggctcactgcaacttccgcctcccgggttcaagcgattctccagcctcagcctcccgagaagccgggattacagaagccgggattacaggcgcgcgccaccacacccggctttttttttatatatatatttttagtacagacagggtttcaccatgttggccaggctggtctcgaactcctaacctcaagtgatccgccggccttggcttcccaaagttctgggattacaggcatgagccaccgcgcccggccaccacaggattcttattttgtctccttttcctgagtctgtcagtctctgggcatcttaacctaactagctatgtcgcctcagacactttatttatttaacctatttttttctttttgagacagagtctggctctgtcacccatgtggtggcagcatcatagttcactgcagcctgggaactcctgggttgaagcgatcctcccgcctcagcctcccaaatagcagggactacaggcgcacgctaacacacccagctaattttttttaaaaaattggcagtgacagagtcttgccatgttacccaggctggtcttaaactcctggcctcaagggatcctctcacctcagcctcccaaagcgctgggattacaggcctatttaacttttgttgtttttgttgttgttgagacagagtctcgctttgttgcaaggctggaatgcagtggcgtgatctcggctcactgtaacctcacctcccgggttcaagcgattctcctgcctcagcctcctgagtagctgggactacaggcgcacgccaccacacccagctaatttttgtatttttagtagagacagggtttcaccatgttggccaggatggtctcgatctcttgaccttgtgatccacctgtcttggcctcccaaagtgctgggattacaggtgtgagccaccacgcccagccttaacattttgtacctcaattttcccatatgtagaactaggttaaggatattactaattccatgggctagtatgaatattaaattaatacaaataacatgccatataagggtttatcatcatcatcatcatcatcatcatcatcaccacttcggctctctccctctctgttattgtctcacagtttgtctttctgtatttatctctttctctgtgtgccttaattccctctcttctttccccacagtggctgcaggtttcgtcctccgccagtgtggcagtgatggccaatggggactttggagagaccatacacaatgtgagaacccagagaagaatgaggcctttctggtaagaagaggtgagggcttcaggttaggagtccagggagagatggaaaggcagtagattcaggcagggcctgaaaccccttggactgttcagacctctgggttgtaagtgagagaaactcaactcagacttgcttcaaagagagaaagatgtactgccttctgtgatggaaaagaataagatggccgggtggtgtggctcacgcctgtaatcccagcactttgggaggccaaggagggtggatcacttgaggtcaggagtttgagaccagcctggccaacatgtcaaaaccccgtctttactaaaaatacaaaaattagctgggcatggtggtatgcacctgtagtcccagctactcagagggctgagacatgagaattgcttgaacccaggaggcagaggttgcagtgagccaagatcgtgccactgcactccagcctgagtaacagagcgagactccatctcaaaaaaaaaaaaaaaaaaaaaaaagaatgctgtagttgggccaaggtcaatggctcatgcctataattccaacactttgagaagatgattgcttgaacgcaggattttgagaccagcctgggtaacatagtgaaactccatctctacaaaaaatataaaaatttggccaggagtggtggctcatgcctgtaatcccagcactttgggaggccaaggcgggcggatcacgaggtcaagagattgagaccattctggccaacatggtgaaaccccgtctctactaaaaatacaaaaattagctgggcatggtggcacgcacctgtagttccagctactctggaggctggggtgggaggatcgcttgggccctggggggcgaggctgcagggaaccatgatcctgccagagcactccagcctgggcaacaaagcaagaccatgtctcaaaaaaaaaaaaatctctggttggctggtcacatgcctcgtgccctggagctgaagggtggagtcagcccttctcaaataagggtaagcagttccccaagataaaatagggtatttgggcagaaacaaagagcagaggtccttccagtctctctctgggcctggggcttcgagccaagccttgttcccttccccttcttgccccgaccaggaccaaaggctcatcttggagcggttgcaggtcatgtacactgtcggctactccctgtctctcgccacactgctgctagccctgctcatcttgagtttgttcaggtgggaccttaaccctgagtggtggcggcagagatgtgagctcggcctcagtttgtccagtaagatggggtggtctgtttccaccaggtccagctatccactggtggttctatggggagcagtgggggtggttaaaggagctctgtgtggccgggagcggtggctgatgcctgtaatcccagctctttgggatgccaaggcaggaggatcgcttgagcccaggagtttgagatcaggctgggcaatatagtgaaaccttgtctctacgacaaataaaattagctaggcatactggtggtgcacctgtggtaccagctataggggggcgctgagacaggaggattgcttgagctcaggaggttgaggctgcagtgagccctgattgtgtcactgcattctagcctgggtgacagagtgagaccctgtttaaaaaaaaaaatagaactctgtgtggctgaggacagctctccaggggcccccacactgccttccaaattcccctaggcggctacattgcactagaaactatatccacatcaacctgttcacgtctttcatgctgcgagctgcggccattctcagccgagaccgtctgctacctcgacctggcccctaccttggggaccaggcccttgcgctgtggaaccaggtgggcatcctccttccgttcctccaaatgggaatcttgcttctctggtgggaccaggaagttctcagtccatttcctatctcctacactctccacagtttatctgagttgggagggtccctctccaaatgtgtcttggggtgggggatcaagacacatttggagagggaacctcccaactcggcctctgccatcatttaactctcccagcctatcactcccatactggaattttccgttcctctccctcattatttcacccatcattgaactttttcaccaatgagagaatccacctgctggcggtgaggcatggcaggatacgagaaagtaagtgggggtggggatgtggcaggtgccagtttgttactaggagacagggtgggagagactagagtctgggagcagacgtggtaagaactaacttgttgaaagttggaccataccaattgttaagaagccgcacgcacccaggcacagtggctcacatctgtaatcccagcactttgggaggccaagacgggcagatcacgaggccaggagttcaagatcagcctggccaatatggtgaaaccctgtctctactaaaaatacaaaaattagctgggtgtggtggcggacacctgtaatcccagctactcaggaggctgaggcagaagaattgcttgaacccaggagacagaggttgcagtgagctgagattgcgccactgcactccagcctgggtgacagagcaagactccatcgcaaaaaaaaaaaaaaaaaaaaagccatagcgtggcccggcagtggctcatgcctgtaatcccagcactttgggaggctgaggtgggcagatcgctttttgcccaggagttcaagaccagcctgggtaacatagcaaaaccccacctctacaaaaacatacaaaaattagccaggcatggcggccctcgcctgtactcccagctacttgggaggctgagatggtaggatcacttgagtccatcaggtcgaggctgcagtgagctgtgatgctgtgatagtgccagtgcaatctggcgaaagattgagaccctgtttcaaaaaaataaaatgaaataaaataaaataagaggggccaggcacagtggctcatgcctgtaatccaagcactttgggaggacgaggaaggcaggacacaaggtcaggagttcaagaccagcctgaccaacatagtgaaaccccgtctctactaaaaatacaaaaattagctgggcatggggcacatgcctgtagtcccagctactcaggaggctgaggtaggagaatcacttgaacctgggaggcagagattgcagtgagccgagatcgtgccattgcgctccagcctgggcgacagagcaaggctccgtctaaaaaaaaaaaaaaaaaaaagaggaagccatagggcaggagagtccataatgtgggtactggcagggagttcagttcttagaaggagctggggtgaccagtgacagaggtcacattttggggatctaggggggaactgacggcaatgatggaagataccaattattttttgttttgtttttgtttgttttgtttctttgagatggagtctcaaaaaagaagctgatttttttttttttttttttttttttgagacggagtctccctctgtcgctcaggctggagtgcagtggtgcaatctcggctcaccgcaacctccacctcccgggttcaagcgattctcctgcatcagcttcccgagtagctgggattacaggcgcctgccaccacacctggctaatttttgtatttttagcagagacagggtttcaccatgttggccaggctggtcaccaactcctgacttcaggtgatccgcccacctcggcctcctaaagtgctgggattacaggcgtgagccaccgcgccctaccagataccaattgttaaggggttcagagtgggagagtccatacagggaaagggaatagggtgagagaaaccaatcacagataccattcactggggacacagagtggaagaacctttgatggcaagagacggggtggaagggcgatcaaagctgggggagactgggagacacccgggcagcgctgactacccctctaccggtctggcccctccctaggccctcgctgcctgccgcacggcccagatcgtgacccagtactgcgtgggtgccaactacacgtggctgctggtggagggcgtctacctgcacagtctcctggtgctcgtgggaggctccgaggagggccacttccgctactacctgctcctcggctggggtgagctccgatcccgtcccccgcccaacccagcgcgcctctcctcggctcccccaactgccctgctggttggcctctgcgggtctcctcccgtctctaggcttctgccttccccaccccgacagaggaattccgcgggtcttgggcctggcggggcccgtgagcgcgctgacagctgcggcggggtgggggggcggggtcggggtctgcacaggggcccccgcgcttttcgtcattccctgggtgatcgtcaggtacctgtacgagaacacgcagtgagttgcagggtctggggcggggcgtgggaggtgggcggggctttgagggactgtggcgggttgtgatggacatgtgggcagggtcggaaggctattcggtgctggggatacgtgggcgggatccgaagtaatggggagctaggaaaggttgtgttccagggcaatcggcaaggggagggggtggggcctggatcgtaatgggcgggaccttagagaatgtgtgtggtctcaagtgcggtgggcggggcctagcgagcaaatgagcttggtgatcggtgagtctagagtttttctatctcttagctctactccgccttccccaggtgctgggagcgcaacgaagtcaaggccatttggtggattatacggacccccatcctcatgaccatcttggtaggatcggtcccgcctccaccaggccgccctcagggatttcccattctgggaagtgggctgccacctcctcctgccccttcagaatgggatcgcggctggctcagcccttatctctccccacagattaatttcctcatttttatccgcattcttggcattctcctgtccaagctgaggacacggcaaatgcgctgccgggattaccggctgaggtgagggcatgcgttggggaccgaggggaaggggccgggtgcgagatggggaaccagggctgcgggatcactgctgccgccctctctccccaggctggctcgctccacgctgacgctggtgcccctgctgggtgtccacgaggtggtgtttgctcccgtgacagaggaacaggcccggggcgccctgcgcttcgccaagctcggctttgagatcttcctcagctccttccaggtgctcaggcagggtgcaggggctccatccttccacccagggcctcctccccagaggggcacgaaagctacagtcgttctctggtgcagccactgaatggggtgggaagatgggatttagttcgttcattaattaattcattcttttttttttttgagacggattctcgccctgtcgcccaggctggagtacagtggcgcgatctcggttcattgcagcctctgactcccgggttcaagcgattctcctgcctcagcctctagagtagctgggattacaggaatgtgcgacaacacctggctaattttgtatttttagtagaggcggggtttcaccatgttggccaggctggtctccaactcctaaccttgggtagtccacccgcctcggcctcccaaagtgctgggattacaggcgtgagccatggcgcccagcccgttcattcattcgatacaaaatactgagctaggactgtcctgggctgtggggagcagcagggaccaggacaggagattggcggccccagcagtgctgcctgctagtgaagagtgagggcttcgaagctggacacagctgaggccaaattcaggttctgtcactttctagctgtttgccagctgtgtggccttcacctcagggttgagggtagggagaggtaagtgaggtgccaacgtgcagaatctaaggaaagattcattccaaaattgaaggcccaccttacacttgcttggtttacctgagtccccaacctgcttcacctcattcggcctgttttctcatctctaaagtggggaaaatactagtctcagtggacaaggctgttcattcattaaattcagcaaaaaattactgagcatgtgtatatgctaagcactcctccaggcttatcacaggaatacagccaagaaccaaatggtccctaccctccagtgggaaagacacactaaacacactatagaagtaaggcatacagctgggcgcagtggctcacacctgtaatcccagcattttgggaggccgaggcaggcggatcacctgaggtcaagagttcaagaccagcctgaccaatatggtgaaaccctgtctctactaaaaaaatagaaaaattagctggatgtggtggcggccgcctgtaatcccagctactcaggaggctgaggtcggagaatcgattgaacccgggaggtggaggttgcagtgagccgagatcacgccactgcactccagcctggccacagagggagatcatgtctcaagaaaaaaaaaaaaaaaaaggaaagcatatagaatgtcagatggtgagatgtgcctagagggagaataaagcaagaaaagagatgaggagtgtccactgagggatgggggttactgttttatttatttttatttttttagagatgaggtctccctctgttgtccaggctggatccagtgcaggggtgtgatcctagctcactgcagccttggactcctggtccaaagcaatcctcctgcttcagcctcctaagtggctgggagcacaggagcaagccatcacacttgactaatttttttttttttgagacagagtttcactcttgttgcccaggctgcagtgcaatggtgccatctcagctcactgaaacctctacttcccagattcgagcgattctcttgcctcagcctcccaagtagctgggattacaggtgcccactaccacgcctggctaagttttgtatttttagtagagatggggtttcaacatgttggccagactggtctcgaactcctgacctcaggtgatccgcccgcttcagcctcccaaagcgccgggattacaggtgtgagccaccgcgcctggccaagatcctcatctctaccaaaaataaaaaattagctgccgggcgcggtgcctcatgtctgtaatctcagcactttggaggccaaggaggccagtccagcgtgaccaacatggagaaaccctgtctctacttaaaatacaaaaattagcgaggctaggtggcacgtgcctgtaatcccagctattcaggaggctgaggcaggaacatcgcttgaacctgggaggcagaggttgcactgagctgagattgtgccactgcactccagcctgggaaacagaacaaggccctgtctcaaaaacaaaaaaaaaattaacttggtgtggtggtgcatgcctgtagtcttagccactctggaggctgaagtgggaggatccctctagctcaggagttgaggttgaagtgatgaagtgagccatgatcactccactgcactccagcctgggtgacagagccagaccctgtctcaaaaaacaaaaacaggctgggtgcgttggctcacgtctgtaatcctagcactttgggaggctgaggcgggcgtattgcctgagctcaggagtttgagacagcctgggcaacatggcaaaaattctgtctctactaaaaacacaaaaaattagctaggcgtgggggcgcatgcctgtaatcccaggtacttgggaggctgattcaggagaatcgcttgaacctgggaggccaagtttgcagtgagctgagatcgtgccactgcactccagcctgggcaacagagcaagactctgtctccctgtctccaaaaaaaaaaaaaaaaaaagcaaaaaacaaaacggcaacacaatcaccctaaattttcacaactactactatattactgctccattttccagatgaagaaactgaggcacagtgtggttaagcagcttgcccaaatgggaaagaaagtggaaaggtggtttttgagtccagggagcccacctccagggtccacagttcttaacccccagccagcagtgctcagctaaccttctggagcaagcagtggggttggtgtgggggaagccaggaaccagtgaaaagatgaccctaatagtttaggaccacggtggcggtagctgaggtgcttcagggcctggcaagggcgcgagcttattaagagaacagttacaaaggctaggcgcggtggctcatgcctgtaatctcagcactttgagaggctgagatgggtggatctccagaggtcaggagttcgagaccagtctggacaacaggatgaaaccccgtctctactaaaaatacaaaaattagctgggcgtggtggagggcgcctgtaatcccagctactcaggaggctgaagcaggataatcacttgaacccgggaggtagaggttgccgtttgccgagatcgtgccactgcactcccgcctgggcaacaagagcaatattccgactcttaaaaacaaacaaacaaacaaacaaacaaaaaacggggagggaggcgcggaggcggttacagtcctgcccccaccagcgatgtaacctccgcgcctcctctgggcagggcttcctggtcagcgtcctctactgcttcatcaacaaggaggtaggcagagacccggccgccgcccccgccctctggcggcagcgcggggtacggcgccgcctctgagcgccatcgtctcacaggtgcagtcggagatccgccgtggctggcaccactgccgcctgcgccgcagcctgggcgaggagcaacgccagctcccggagcgcgccttccgggccctgccctccggctccggcccgggcgaggtccccaccagccgcggcttgtcctcggggaccctcccagggcctgggaatgaggccagccgggagttggaaagttactgctagggggcgggatccccgtgtctgttcagttagcatggatttattgagtgccaactgcgtgccaggcccagtacggaggacgctggggaaatggtgaaggaaacagaaaaaaggtccctgcccttctggagatgacaactgagtggggaaaacagaccgtgaacacaaaacatcaagttccacacacgctatggaatggttatgaagggaagcgagaagggggcctagggtggtctgggaggcgtctccaaggaggtgacacttaagccatccccgaaagaggtgaaagagatcactttggggagagctggagaacaggattctaggcggaagcgatagcataggcaaaggcccttgggcaggaaggcgctcagccttggctggagtagaattaagtcagagccaacaggtggggagagacagagaagtgggcaggggcacccaagttgggatttcatttcaggtgcattggagattcttaggagtgtctcttgggggtaatattttattttttaaaaaatgaggatgtcactcttacccaggttggtcttgaactcctgggctcaagcaatcctcccaccacgggtctctcaaagtgctgggattacaggcgtgagccaccgcacccggcttttttttttttttttaaacggagtctcactctgtcacccaggctggagtgcagtggtgcaatttcagctcactgcaccctccacctcccgagttcaagcctcccgggtagctgggattacaggcaccgccaccatgcctggctaatttttgcattttcagtagagatagggtttctccatgttggccaggctggtctcgaactcctgacctcaagtgatccacccacctcagcctcccaaagtgctgggattacaggcataagccaccatgcccggcccaaatgggctaatgttttaaacagatccttcttgtctgccctgtaggaggacaaattatcaggggcaggggtggaagctggagcccagaaaggaggggactgcaggtgggaagtgatggtggctggaccaggatggaggccactgaggggtatgaagcagtcggatttgaagctgtttaaaaggtggaggtgagaggatttcatgaaggagcacatgaggacacagcagcagagaggactccttggctttggatggtggagagactaaagatagagagattgggttcgggtagggggagaaccacgtgtgctctttggaaaggttaggctggcagtgtttgtaggacatgacaggacactgagtgtaagggtctggagctctcaggagaggggcgagctggagatagtaatgtgagaggcactgggtcctgagagggtgatttggtgtggaccggagcacaggtgaggcaaggcaggcctcgcagctgaaactttatatccagagcagccagggccactgctggctgcggagtgaggacgcatatccccactgtccttagatgggtggcccctggaacctgggagaatgagggggcatgctgacagtctcattgtggctggaccacctgtacatacacccacaagaccctcacccctaaatcctccccctacacatatgcacacttaagttaccgtatgggtgttgtcgagcattttccctggggtctgtggctccctggaccgacatgccccaaagctgaactcagccttttcaagcttgcggccctgctgcccaattcccctacaccctgccttgtgggttctcgcggggtgggggccttagggcaaggctcttgtaaataaagtataagaaacagttgctttttttctttcttgggtagaagcatcttcttggcagtgtcacaaagggaaatgaccgaggcaggctgcctggtggagtaggggcccgtggtggctttactcaaatttatccatgtgttgctacaagaaaacgggacacctgctgccactgtccctcctaagagagtccccaagtggccatgttacatgtgatctgtgacatatacgatcagatgttacctgcatcctagggtcgcctggcatgcccatgagtgacgcttaggaccgtgcctggtgctggtgtgtggacaatgctgggccagtttgcccagggctatgcctgccacctctacttttatttcaccctctggaggcggacgcattggaaagcatgtggggcaggaggtgaggaaggaaattcagacaagctgagcagagcggccaggactggaatcttgggtgccaacccgcaaggtggggaaactgatttccatttcccagtaattacaggtcaataccacacctgagaaggcaggcaggaatggaacccagactgactccagggctgtgttgcttcctgtatcagaaccaaaccccgggtgacctcctgttgcatgccccttgtcccaactttatagattaggacactgcagctccatcttgctacccaagagttaagactttttctggaggacctggctccccgggtttggaaatagtaccattgtttcctaactgggtgaccccgagcaagttgcttaccctctcttggcttcaacgatctcatctataaaatgggatcacttaggtcgggcgtggtggctcacgcctgtaatcccagcactttgggaggccgaggcgggtggatcacaagatcaggagtttgagactagcctggccaacatggtgaaatcctgtctctactaaaaatacaaaaattagctgggcgtggtggcgggcgcctgtaatcccagctacttgggaggctgaggaagaactgtttgaacccgggaggtggaggttgcagtgagcagagatggtgccactgcactccagcctgtgggcaacagggtgagactccttctcaaaaaaaaaaaaaaaaaaaatagctctagtatccaccccacagatggttgtttccaattagatgtagtaaatgcacgcctttataaccccataacccattgccttctgtgtatcaggcctctctctgctgcagggtcccagctctgccacaatgctcacagtgtatctcaggctgtgcctttcttttttttgttttctttttcttttttttttttttgagacggagtctcactctgttgccaggctggagtgcagtggtgcgatctcggctcactgcaaccttcacctcccaggttcaagcgattctcccgcctcagccttccgagtagctgtgactacaggcgtgcaccaccacacccagctaatgtttgtatttttagtagagacacagtttcaccatgttagccaggatggtcttgatctcttgatctcgtgatccgcctgtcttggcctcccaaagtgttgggattacagggcgtgaggcaccacgcccggccccaggctgtgcctttcacagctcagagcagggcacacatctcactgagtgtgcactgacctcaggcctgcaaactcttgcaactttcaggtgtttgcctatatccagaggacagagacataggcagagacaaagatatggggggagggcccaacacagtggctcacacctgtaattccagcattttgggaggccgaggcaggaggatcacttgagcccaggagttcaagatcagcctgggtaacacagtgaaatcccatctctacaaaaagccggcaggaggatcaattgagcctgggcagtcaaggctacagtgagccatgatggtgctgctgcactccagcttggcagacagaatgacaccctgtctcaaaaaaaaaaaaaaacaacaaaaaacaaagatatggggagcacacgatgtgtgtgtcagagcaacacagggaatttccttaatccccccagtatataccacctccctttcccacctccatttatctccccaaatttgtcagagaattcctctcaagggtaatgcagttgaatctgaggggcagcagagctcaggggtgaagccacaggctctggaggtgagtttaaatcacagcaccaccacttcctggctggttgtccccgcaaagtgacattgcctctctgtgtctcagttccttcttctggaaaagggggataataaattaacaggcccgcgccagagctgttgggaggatgtttgaaaagcgctgagcctggcctggcacctaaacagctcagcaagtgttagccaggatcactagcagtaatatttagctactgactgctttcttttcttttctttcttcctttctttccttttttttgagaggtagtcttagaatctgttgcccaggctggagtgcagtggcgcgatctcagctcagtgcaacatccgtctcttggttcaagctattctcctgcttcagcctcccaggtagctgggaccgcaggcgtgcaccaccatgcctggctaattttgtatttttagtagagacagggtttcaccacgttggccaggctggtctcaaactcctgagctcaggtgatccacccgcctggcctcccaaagtgctgggattacaggtgtgagccactgcacccggcccttttttctgtttcttatctatttagtttagagatagtatcacactgtctataaaactcacaaccattctcccaggctagtcctaaacttctgggcttaagcaatgctctcacctcagccgctgtgctggtggcactgactgcgttcatcacctgtctaatcctcctgtctttcagggcagaccagaggctcctgggtacctggtgcccctgcactgcaacacagggctggacacacagggggcatttgggggatgtttgctgaaggaacaaacataaagaaaggctgaaagatacacatatataatttttgagatggagtctcactctgtcacccaggctacagtacagtggggccatctcagctcactgcaacctccatctccggggttcaagcaattctcctgccccagcctcctgagtagctgggattacaggtgcctgccaccatgccctgttaatttttgtatttttagtagagacggggtttcaccatgttggccaggctgatctcaaactcctgacctcaggtgatccacccgccttggcctcccaaagtgttgggattacaggtgtgagacaccacgcccggccagtttttgtatttttagtagagacagcgttttaccatgttggccaggctggtctcgaattcctgacctcaggtgatctgcccgcctccacctcccaaagtactgggattacaggtgtgagccaccatgcctggccccaaaagatactttggtcaagcgaggccaattcattataagaggtagagaagagagcaacagagtgacaaggagaagctcaggaagattaaagcaggagagctaaaatgttctccagagccacaactgggcgctcatttccatgcaaactgtttgctttgcagatggagaaagtgaggcctcgatggggcagagccagggcctctccacttgctcaggggtcctgctcccaccattcagtccgataccagctgcctcccccaagccctcctgaatccaccccactcccaaggctctggaaacagataccactagaaaaaaacacagagctttattattctcaacaccaatggcagcggtcttcataggacagaggagtgagttctgtcaacagacaggcggcccctacttgccggcgatgagcgggttccgcaggaccacgatgactgagtccccgcgcaggaacatcttggagatgtagcggtctttgttgactggcttggacttcttcttgcccttgccactcttgggtacctcagtccacatctccttcacgttctccagcaccatgttgcagtgcctggtggggaacagggaggggaggcactgggcgtgaggggcgtgcctctgacagtgccccctactgcctgctgctcgccccctccagcagcatggcttggggaagggtgcaggtgctaggccgggatgaccaagctgccaaagcaactctgccagtccttaggttgaggctgaggcaaaggactgcacctctctgtgccagtttgctcctttttaagagggaagataatcacgttaccttcctcacagggccattgaaaattatcattttcttttttgagacagaatctcactctgttgcccaggctgcaatgcagtggtgcgatttcagctcaccacaacctccgcctcctgggttcaggctattcttgtgcctcggccacctgagtagctgtgaatacaggcgtgcaccaccacgcctggcttttatatttttagtagagatggggtttcgccattttagctaagctggtcttgaactcctgacctcaggtgatctacccgccttgccttcccaaagtgctgggattacaggcatgagccaccacgcctggccatacaccccaggcttctgagacagctgtctttgagctcttcagactggagctggagtggcctctccaggcctgcggagaacacctcccaggacccagcactcacctatcgaaggccttcacgcggcccaggagtttcttattgttgcggcagttgatgagcacttgggtattgttcttgactgactgtgtgagcacagagagtggaccggtgttaaattcctcctcctctcgcttctgcagctcctctggggtcatctcactcttgggcttgttgaggaggctcctgcatggacaaacatggaaccaataagtgagagaggctggagttgagaggctggagctgtgaggatgggtgatcagggccttggcttcagtgtctccccaaccttgtcccaccacatctgtcctcctgttcagccttctgagtatcatcagctagatgcctaacagacattttttttttttttgagacggagtcttgatctgttgcccaggctggagcgcagtgatgtgatctcggctcactgcaacctctgcctcctgggttcaagcgattctcctgcctcagcctcctgaggagctgggactacaggcatgcaccacctccacgcccagctaatttttgtattttagtaaacagggggtttcaccatgttggccaggatggtcttgatttcttgaccttgtgatccacccgcctcgacctcccaaagtgctgagattataggcgtgagccaccgtgcccagccagacattttcaactctgcatgtctcaggtcgggatccagatcacccaaccacccaagcctaccctatctacagcgttccccatctgctttgatggtaactccatccttctagttctctgggcaaaaactcttttgtcaacttgattcctctttttccctcacatcctacatgaaatctgtaggaaatggccgtttcttaccatggcctaagcctctgtcatctctgtcctggaatctttctggtctctctgcctccacccacgttccctgacagtctgttctccacagagtggtctgagggggttgtgctaaaacctaaatcataacatgtcactcttcaaaaccctcccagggtatgggtacagtggctcatgcctgtaatcctagcactttaggaggtcaaggtggattgatcacttgatgtgaggagttcgagaccagcctggccaacatggtgaaaccccatttctactaaaaatacaaaacaaaacaaaacaaaacaacaataaaaaaaacaaccaacagaaaattagccaggcgtggtggtgcacgcctgtaatctcagctactcgggaggttaaagtagaagaattgcttgaactcagagagtcggaggttgcagtgaagtgagatcatgccactgcactccagcctgggtgacagagcgagactcttgtctcaaaaaataaataaatacaaattagaaaatacaaaaattaggccagatgcgatggctcacgcctgtaatcccagcactttgggaggccgacgcgaggtggatcgcctgagctcaggagttcgagaccacccagggcaagatggtgaaaccctgtctcttctaaaaatgcaaacaaattaaccaggtgtggtggcgcatccctctagtcccagctacttgggaggctgaggcagcagaaacgcttgagccccagcagcgaaggttgcagtgagccaagattgcgccactgcactccagcttgggctacagagtgagactccatctcaaaaaaaaaattaggccgggcgcggtggctcacgcctgtaatcccagcactttgggaggccgaggcgggcggatcacgaggtcaggagatcgagaccatcctggctaacacggtgaaaccccgtctctactgaaaatacaaaaaattagccgggcgaggtggcgggcgcctgtagtcccagctactcgggaggctgaggcaggagaatggcgtgaaccccagggggcggaggctgcagtgagccgagattgcgccactgcacgccagcctgggcgacagcgagactccgtctcaaaaaaaaaaaaaaaaaaaaaattagctgggcatggtggcgcatgcttgtaatcctagctactttgaaggctgaggcaggaagatcgcttgaacccaggagacagagctcgtgctactacactccaatctgggtgacagagcgagactccatctcaaacaaacaaaacaaaagaaaaccctcccatcctccccccatctcagtgtagaaagtaaaaccccgaccagacacggtggctcacacctgtaatcccagcactttggaaggtcgaggcgggtggatcatttgaggtcaggagtttgagaccagcttggccaacatggtgaaacctggtctctactaaaaatacgaaagttagctgggcatggtggtgggtgcctgtaatcctagctactcgggaggctgaggcaggagaatcgcttcaactcaggcggcggaggttgcagtgagctgagatcgcaccattgcactacagcctgagcaacagagcaaggctccgtctcaaaaaaaaaaaaaaaaagaaaaagagaaaaagatttttcttttcccttggggactagaggtttcattcactgatgtatcctatgtagcttaagcagtgtctgatacataagcattcaatgtaatatctgctgcactaataaatgcgcaaaatcatgtcaatgactcgttcgttatccgtgtaagttgtgaatcaagtcgaaaacgcacccgtctccagctcaaatgatcaagataagtcccttatttcaaataattatttctaaaagtcctaacttccctcccccattattcgttttatttcttttgtttcgttttgagatggagtcttactctgtcgctcaggctggaagtgcagtggcgcaatctcggctcactgcaacctccgcctcccgggttcaagcgatcctccggcctcagcctcccgaatagctgcaattacaggcgcccgccactacggccggctaatttttgtatttttgttagagacggggtttcaccacaatggccaggctggtctcaaactcctgacctcaggtgatccgcccgcctcggcctcccaaagtgctgggatttacaaacctgagccaccgcgctcggcctcccccagtattcgtaaaatcgctgccccttaacattcatttcaataggactaattatctaggaccactcccgttatcgtttaaaacatgtttttcataattaaatttttttttttttttgtagagacgggggtctcgctatgttgcctaggctagtctcgaactcctgtgttccagcgatgctccgccttggcctactaaagtgctgggatcacaggaatgagcccccgcgcccagcccagggcgttatctgataaagctgtcccctctcccgaagtcacgatgcgtcaaaggccccacgcccgttctcaaactcatcaggagaaaagcaggacgctgcatccctaaaacatctgcccctgccccccccgctctgctcaacccttcccacactcaatcggtcaaatatccaccctcaacctcattcccgccgcctaagcctagcccggcctcacatgatggtcactacgctctccgttcactcccgtttcctccgcgttgctgctgcctgaggagagagaggcgggacttcctcttcctgcgacccacttccgttggcgcctgcgcaaagccaaccagtaagtggaggcgtggcctgttgccacagcattccccaccaacggtgcacaatgatggaataaaagcttcgggtaggggttcgcggccagtcagaaccacacgggggcagatgtttatgacaatgaagacaaaaggaaaggcagtctgattcaaaccgtttcttgaagaatggtacaggttgaaggagggaaatgacaagctatttccaaatgcccgccggccgtgacttcgggggcgcggcctccgtgaagccaatccgctcctcgcttcggagacaggcaccgcccctcttccctctgggacgcgttactgacgtatctactgatctttccgaccctgcgccaccaatcccctgcctacatccggaaggggcatggacctgcgcccgggagatcgaatattttccatgatcaaacgctgttcattggctttccctcctccgctaaggcggagcctacttctcttgcgctcccatttgggtcgtgccattctcaggggaaccaaccccaatacctaagggaggctgggaggcgtgtcctcaggaccgtagttcttattggtttcgctgctcgctgtggggtgggctggtgcagccgcagctgttgcttattggcccaccgattccatggggaggaacttggctgggcctaaactcaatccgtggtctggtacaggtttcagggcaaagcggccatgcgttccgggggccgcgggcgaccccgcctgcggctgggggaacgtggcctcatggagccactcttgccgccgaagcgccgcctgctaccgcgggttcggctcttgcctctgttgctggcgctggccgtgggctcggcgttctacaccatttggagcggctggcaccgcaggactgaggagctgccgctgggccgggagctgcgggtgaggctgggcggggacccgggcaccgcggggaccctcattccctccccgctgttacccagggttgacgtggctttagcgtacggccctaaccgcagatgccaccgtcttcgtcatctgagcgcatgacccttaccaaaggaataaggcttcgggctggttctgcaacagtagcttccttttaagaggaaaggtctgaaatagtaagacgggggggttcagggttctacgcctttagtcaactatttggaagagtcccttcctccatctcccctctctctcactgggcctcgatttccccatcaagtttgaggtaggctggaccggatggtcttggaaggacttttcctgagccttggatttatcctagaagtctccgatgctggaggcggcagattaggaagagaacccggggctcctcgcgggtgacggcgcccggggtagggttgaaatgggggggttgctctcattcttcccttccctatcccacctccttcccaaggtcccattgatcggaagcctccccgaagcccggctgcggagggtggtgggacaactggatccacagcgtctctggagcacttatctgcgccccctgctggttgtgcgaaccccgggcagcccgggaaatctccaagtcagaaaggtaaagggacccacctccagtccctgaccccctagccctccagggaatgggaaataagaatcctgttcaagatcccaaagaagctaagaggaggaactggggctctgactggagttaatcggactctagactccatgctggtaacaaaccaccaggctgtactgccccccttaatgcccccaccaaaagcttactgtgtgctaggcataggcaacagacagccctataaggtgggtaccaatatgatcttcattatgcagatggggaaactgaggctcagagaggttatacacattgcacaaatcctacagataataagtagtagaccttagccgggtgcagtggctcatgcctgtaatcccagcactttgggaagccaaggtggaagaatcacctgagaagtttgagactagcctagtcaacctagtgagacccaatgtttagaaaatcatagacctagagttgaacccaaacaggttggctccgagctggtgctgtaatgtatctgttgtcttccagaaagcatgaagagtcatttaaaggccaggcgcagtggttcacacctctaatcccagcactttgggaggccgagacaggcagatccctcgagatcaggagtttgagaccagcctggccaacatggtgaaacctcatctctactaaaaatacaaaattagccaggcgtggtggtgggtacccgtagtcccagctacttgggaggctgaggcacgagaatcacttgaacccaggaggcggagactgcagtgagctgagattgcgccactgcaccccagcatgggtgacagagcgagactccatctcaaaaaaaaaaagtcacttaaatactgcctgagtcccaatgctacctcatccacttagattgtgaccttggactggtttcttttttattttattttattttattttattttgagatggagtctcacactgtcgcctgggttggagtgcagtggcgcgatctcggctcactgcaacctccacctcccaggttcaagcaaatctcatgcttcagcctcctgagtagctgggattacaggtgtgcaccaccatgcctggctaattttttgtatttttagtgagacggggtttcaccatattggccaggctggtctcaaactcctgaccttatgatccgcccacctcagcctcccaaagtgctgggattacaggcgtgagccaccgcgcccggcctggactagtttcttaacctctctgagcccatttcctcatctgtaaaatggggtcatgtattggcagtccctcccctaaatggttcctagaagagggcttagcacacagtgagagctatttaagggtaagctgtgatgagtcttgctggcttcaagaggtggggtctccccaacatctggcacccagtaggtactcaccagcactgtcaagggaatgattttaatcagagtagggggctgggcacagtggctcacatctgtaatcccaacactttgggatgctgaagcaggcagatcacttgaggtcaggagttcgaataccaggctggccaacattgtgaaaccccatctctactaaaaatacaaaaaatagccaggcgttgtagggggcgcctgtaaccccagctactcaggaggctgagtcaggagaatcacttgaagccaggaggcagaggttgcagtgagccaagatcaagccactgcactccagcctgggtgacagagcaagactccatctcaaaaaaaaaaagaaagaaagaaagaaatccattcaatcagagtggggctttagtgtcaacccatctgctctgcatggctcaggtcacgtggcccttctccccacctcctccccagtccccgtccaccctcccacctctctcttgccgctagttcctggaggccacgctgcggtccctgacagcaggttggcacgtggagctggatcccttcacagcctcaacacccctggggccagtggactttggcaatgtggtggccacactggacccaagggctgcccgtcacctcacccttgcctgccattatgactcgaagctcttcccacccggatcgaccccctttgtaggggccacggattcggctgtgccctgtgccctgctgctggagctggcccaagcacttgacctggagctgagcagggccaaaaaacaggtgaggagcaggagtcggggagggtagtgggctacctccaccttttcccaagcccccaccctcccttgcctggacatttgtcatccctctcgtcttcccactctactccacgcacagagccacagggatcttttttttttttttgagacggagtttcgctcttgttccccaggatggagtgcacatggcgagatcttggctccccgcaacctctgcctactgggttcaagcaattctcctcccaacctcaggtgatctgcccacctcggcctctcaaagtgctgggattacaggcgtgagccaccgcgcctggtcatcacagggatctttttaccttctagatgtcagattctctttcctctcccccaaaccctcccagggctcccgcctcattccagccataatccagagtccttatattggcccacgagctgtgccctgttacctctccagcctcatctcccacccctcacctcttgctcactctgctgtagccacccccacctcctctgggttcctcaaacccgcagagcttgctcccacctcagggcatctgcacttgctgtttgctttggatagaatgtgcttttctggccaggctccgtggctcacacttggaatcccagcactttgggaggttgaggtgggtggatcacaaggtcaggagttcaagaccagcctggccaacatgatgaaaccccatctctaccaaaaacacaaaaattagccaggcttggtggtgcacacctgtaaccccagctactcgggaggctgaagcagagaattgcttgaacccgggaggcggaggttgcagtgagccaaagttgcaccactgcactccagcctgggcaacagagcgagactccatctcaaaaaaaaaaaaaaattatctgggagtagtggcatgctacttgggaggctgagaggggaggatggcttgagtctaggagtttgagactgcagtgagccatgatcgtgccactgtattctagcctgggtgacagagaccttgtctcttaaaaaaaaaaaaaagaatatgcttttcatagatatcttcctggctggctcccactcttcactcaggtgtccactccaatgtcaccccttcaaagaggccttcccggccgggcgtggtaactcgcacctgtaatcccagcactttgggaggccgaggcaggcagatcatttgaggtcagaagttcgagcccagcttgtccaacagggaaacctcatctctactaaaaatacaaaaattagctgggtatggtggtacatacctgtaatcctactacttgggaggttgagacaggaggatcacttgaaactgagaggcggaggttgcagtgagccgagatcgcaccactgcactccagcctggatgacagagcgagattctgtctcaaaacaaacagaaaagaaaaacacaggccaggtgcggtggctcacacctgtaatcccagcactttgggaggccaaggcaggtggatcgtgaggtcaggagattgagaccatcctggctaacacagtgaaaccccgtctctactaaaaatacaaaaagttagctgggcgtggtggcgggcgcctgtagtcccagctacttgggaggctgaggcaggagaatggcgtgaactcgggaggcagagtttgcagtgagccgagatcgcgccactgtacgccagcctgggcgatacagcgagactccgtctcaaaaaaaaaaaaaagaaagaaaaaaaagaaaagaaaagaaaaacacagatttaatcatgctcctgccctgcttaacccctctctgtgcctccccagtgtccctataacaaagcccacactccttggcccttgctaaaccttccgtacccctctcaaacctctgggaccccttccctggccatagccttgccctgtgttgctcccttggctgggaatactcttcctcctgctccattttgccaggccagttcctacccattctcatggcaaacatcccttcccaaaagacccaacgccctctccaggccaggtcatcccccagcctccttcctatgccctctcaggactctatagttcttagaagcatttgtctcaactgcatttcactgtttgtataattattcatttgtggatctatctggttcaccaaactgagcttgaggaataataatcagagataacccttatttagttatatgccaggcactgttctaagacctggattcaaaccttaccctttgaaaagaactgttattgccgggcgcggtggctcacatctgtaatcccagcactttgggaggctgaggtaggtggatcatttgaggtcaggagttcgagaccagcctggccaacatggtgaaagcttgtctctactaaaaatacaaaaattagccaggcatgatagcgggaacctgtggtcacagctgtatgggaggctgaggcaggagaatctcttgaacctgggaggtagggggtggaggttgcagtgagtcaagattgcatcattccactccagcctgggtgacagagcaagatttattctaaaaaaaacaaaaaacaaaaaaaaaacaaaaaacctcttattaaccccatttatagatgaagaaactgatccttccagaagttagtaacttccccatgcctgctttgttatgaagcagccaagtacggatttgatcccagacaactgactcggaatctgtgctcttggctaccacgttctatgagtgaggacaccttatgtgttctcttaagcatgcaagcgggcaagaagtgtgggtatgttgaggctgagggctagtcctgagctggctctggccacccccctgctgctcccacaggcagccccggtgaccctgcaactgctcttcttggatggtgaagaggcgctgaaggagtggggacccaaggactccctttacggttcccggcacctggcccagctcatggagtctatacctcacagccccggccccaccaggatccaggctattgtaagaccagggtcccctggcttctggcgagggagggagcaggttaagcagggctggcgtcatcctgcacgggcccctccagtcctagcctttctccttaggagctctttatgcttcttgatctcctgggagcccccaatcccaccttctacagccacttccctcgcacggtccgctggttccatcggctgaggagcattggtaagggtgaatgcggaggtgggccccagcccacctggggtatggggtacagggcggtgggctggggtaggacaggcacctacactctaaaggctcatccaccagtctgggccacatagggagaccccatcttttttttttttttttttttgagatggagtctcgctctgtcactgagactggagtgcagtggcatgatcttggctcactgcaacctccacctcccaggttcaagccattctcctgcctcagcctcccgagtagctgggactacaggcgcatgccaccatgcccagctaatttttgtattttagtagagacagagtttcactatgttggccaagctggtcttgaactcctgacctcgtgatccgtccacctcagcctcccaaagtgctgggattacaggcgtgagccaccgtgcctggtgaccccatctcttaaaaaaaaattagctgggtgcagtggcatgcacctgtcatcccagctactggggagtatccttagagcctgggaggtcaaggctatagtgagccaagattgcgccactgcactccagcctgggcaacagaatgagatcctgtctcaaaaaaataaaaaataaaaataaaataaaggctgggcttggtggctcacacctgtaatcccagcactttgagaggcaggtggatcacttgagctcaggagtttcagaccagcttgggcaatatggcgaaaccctgtctctacaaaataaaaacaaacattaggccaggcgcgatggctcacacctgtaatcccagcactttgggaggccaaagcgggtggatcacctgaggttaggagtttgagaccagcctggccaacagggcgaaaccccatctctactaaaaatacaaaaagttagctgggcgtggtgacatgtgcctgtaatcctagctattcgggaggctgaagcaggagaatggcttgaacctgggaggcggaggttgcagtgagccgagatcacgccactgcactccagcctgggcaacagagcgagactccatctcaaaaaaaaaaaaaaaaaaaattagccaggcatggtggcacctgcctgcagtcccagtgacttgggaggctgaagtggtaggatcacttgagtctgggaggtcgaggctgcagtaagctgtgatcacaccactgcactccagcctggggacagagtgagactctgtctcaaaaaaaagtaataataaaaattaaaattaaaaaaattaaaaattgtttttaaaaataaaggcttggctgggcgcaatggttcacgcctgtaatcccaatactttgggagactaaggtaggtggatcacaaggtcaggagtttgagaccagcctggcgaatatggtaaaaccctatctctactaaaaatacaaaaattagctgggtgtggtagcgtgtgcctgtagtcctagctactccggaggctcaggcagaagaatcgcttgtacctgggagcacaggttgcagtgagctgaaattgtgccactgcactccagcctgggtgacagagcgagactctgtcactaaataaataaataaataaacaaataaataaataagaaaataaaataaaggctcacccagcctttcctctacctccctagcctttctaaggaactagagattagtaatagtgattaccagacaggggctctaaggtgagacagccgtggtttccaatcttaccagctggatgaacttggacaagtggcttcatttctttgagcctcagtttcctatctgtaaaacggccagtgggggccgggcctggtggctcatgcctgtaatcccagcactttgggaggccgaggtgggcgaatcacaaggtcagcagttcgagaccagcttggccaatatggtgaaaccccatctctactaataatacacaaattagctgggtgtggtggtgggcgcctgtactcccagctactcaggaggctgaggcaggagaattgcttgaacccgggaggcggaggttgcagtgagccgagattgtgctactgcactccagcctggcgacagagcaagactctgtctcaaaaaaaaaaaaaaaaaaaaggccggagggcccagacatagtggctcatgcctgtagtcccagaaatttgagtgaccaaggcaggaagatcacatgaacccagaagtttgaggccagcccgggcaacacaggaagatcccatttctacacacacgcgcacacacacacacacacacaattacccaggcatgggggcatgcgcctgaagtcctagctatttgggaggctgagactgaaggatcacttaggccagcgagattaaggctgcactgagctgggattgtcccactgcactccagtgtgggtgagagagcaagatctttttttttttttttggagacagaatcttactctgtcacccaggctggagtgcagtggtgcaatctcagctcactgcaacctccacctcccaggttcaagcaattctcctgcctcagcctcccaagtagctgggattacaggcgcccaccaccacacccagctaatttttgtatttttagtagagacagggtttcaccatgttggccaagctggtttcgaactcctgacctcaggtgatccacctgccttggtctccctaagtgctgggattacaggcatgagccaccacaccaggccacaagatcttgtctcaaaaaaaagaatgtctatgtcttagactctgagggattgaatgagaccaggaacatagtgagcccacaggaaggagtaactggcattcactcttgttgggctgaccagggctttgtctctgggtgctctgccttcctctgatttgtggactggggaccttcgactactaaggactaacccttcctctctaatcgcccccacttccagagaagcgtctgcaccgtttgaacctgctgcagtctcatccccaggaagtgatgtacttccaacccggggagccctttggctctgtggaagacgaccacatccccttcctccgcagaggtaccagctgcagggagggatggagggtgggtgtccaaggaagccacaaattggaactggccaagtccccttcccagggctggggaatggtgctaagtggccttaacctctttgtgctttgatttattcatctgtaaaatggggataatactccctatcttagagtattgttgaggggattgaacatgctaacaccggtaaagaccttacttggaccagcacccagcacatagcaagcattccagaaatgtttgcagctgggcacggtggttcacagctgtaatcccagcactttgggaggctgagcggggtggcggggggggatccttgagcccaggagtttgaaaccagcctgggcaacatggcataaatcttgtctttactaaaaatacaaaaaaattagccgggcatggtggttcacacctatagtcccagctactcgagaggctgaagtgggaggagcacttgggcctgggaagtcaaggctgcagtaagccttgattgagccactgcactctagcctggacaacagagggtgatgatatctcaaaaaaaaaaaaagtgccaggctgggcatggtggctcacacctgtaatcctagcacgttgggagcctgaggcgggcagatcacctgaggtcagtagtttgagaccagcctggccaacatgatgaaaccccatctctactaaaaatacaaaaattagacaggtgtcgtggtgcctgcctataatcccagctacccgggaggctaagacggtagaatcgctggaacctgggaggcagaggctgcagtgagccgagatcacgccactgcactccagcctgggcgacagagtgagactctgtctcaaaaaaaaaaaaaaagtgccagaacatagtatctttcaccagtgtgtggtggcaaggcaaggttacctagaggttgggcttgggctcctgggttgtggtgggctgcagtggacctgacaaagtctcctctgtcacttcaggggtacccgtgctccatctcatctccacgcccttccctgctgtctggcacacccctgcggacaccgaggtcaatctccacccacccacggtacacaacttgtgccgcattctcgctgtgttcctggctgaatacctggggctctagcgtgcttggccaatgactgtggagaggactgtgagagagaaggtcccagcgggggccagtgaagctcaggcaggatctgcctagggtgtgctggtttgtccttttcatacctttgtctcctaattgtgctacaattggaagaccttctttcttttgattgtctcaagctgccacccttcaaggacagggaagagaccactgtgggatgacagccagaggaataagaacttgctccctccccagaggtaaacacttggtccaaaggtttgcagggaccaaatactgttctttttttttttgagacggagtctcactgtgttgcccaggctggagtgcagtggtgcgatctcggctcactgcaaactccgcctcctgggttcacgccattctcctgcctcagcctcccaagtagctgggactacaggtgcccgccaccacgctggctaattttttgtatttttagtagagacggggtttcaccgtgttagccaggatggtctcgatctcctgaccttgtaatccgccagcctcggcctcccaaagtgctgggattacaggtgtgagccaccgcacctggcaaaatgctgttctttaagtcagcgaactgaaaaagtaaaagactgctgggtgtggtggctcacacctgtaatcccaacactttgagaggctgagggggaaggatcacccgaggtcaggagtttgagaccagcctggtcaacatggcgaaaccctgtctctactaaaaatacaataattagctgggcatggtggtgggcgcctgtaatctcagctgcttgggaggctgaggcaggagaatcacttgtacgcaggaggcggaggttgcagtgagccaagatcacaccactgcactccagcctgggcaacagagcgagactccatctcaataaataaataaataaataaatattttttaaaaagagtaaaagactaaaagactattactggtctggcccagtgatgccacccagctagatgaattctctgtggtttgtgttgtgtcagttcattctccagaacagcagccttgctactgcaccagtcctaacctaactcccacacggggcacacagaggatgtcctcataaccaggcacagaggagacagaagctcatattttggaagtccagattcttccagacccagtgggtaataagccattgtttctggctgggcatggtggttcacacctgtaatcccagctctttgggagtcagaggcagagggatagcttgagctcaggagtttgagaccagcctgggcaacagagcatgaccccattctccagaaaaaagaaagaaaaaaaaaagcgtaaccaatgtttctgcaaaacaccacctgcataagccaggtgtggtggtgcacaccctgtagtctcagctattcaggaggctgaggtgagagaatcccatgaacccaagagttcaagaccagcctgggcaacacagtgacaccctgtctcaaaacaaacaccaccaccaccaacaacaacaaaaaaggccattctgtagaactcgtgtaaatagacattgcatgacaagggggatctgaaatccaagaagagggtgagacaacataaaatgagtttcctcactgcatcatgtgaatttttaagacagaacccagaggctcccaaagtatttcactatggaacactttttattgggaagcacttcatagaactaggatacttcggccgggcatggtgggtcacacctgaaatcccagcactttgggaggccgaggccagcagttcagctgagctcaggagttcgagagcagcctggacaacatgatgaaaccccatctctactaaaaatacaaaaattagccaggtgtggtggcatgagcctgtaatcccagctacttgggaggctgaaacaggagaattgttggaacctggtggcagaggctacagtgagccaaaatcacgccactgcactccagcctgggcaatagagcgaggctgtctcaacaaacaaacaaaatacaacaacaacaaaaagaactaggatacctcagaaggtactttggaaaacatggggttttgaaagtctgagagcatctatgagaggaatgggtaagacagatctagatttaccgcagagtagttagggcacactgtctttccccttcagctgttggtacagcactgtgagatggcagtgtaactgcaaactccaatgagcaagtatttcccaaccctacctaattttcagactcagctggggtgctcattaaaaaatgcagactgggtgcagtggctcatggctgcaatctcagcactttgagaggttgaagtgggaggatcacttgagcccaggaggtttttctttttgaggcggagtctcgctctgtcacccaggctggagcgcagtgctgcaatgctggctcactgcaacctccgcctcccgggtacgagcgattctcccgcctcagtctcccaaatagctaggactacaggtgcgtgccaccacgcctggctaatgtttgtatttttagtagagacagggtttcaccgtgttagccaagatggtctcgatctcctgacctcgtgatccgcctgtctcggcctcccaaaatgctgggattacaggcgtgagccaccgtgcctggcccacgctgtccttaaggagacactttggtgcatacacagctgctcagcaaaccgactcaaaagaaaaacctgagacagatggcacctggaagcagtcctacgctgtgtaggtgagcatctgccctccaaatcagctccagggctgaaactcggggtatcaaatgagaggataaacataggtcctcaatttaggttcttccacattcgctgacatttattgagcatctactatgtgccaggcatcatgagaacttttttttttttttaagatggagtttcgctcttgtcacccaggctggagttgcagtggcacaatctcggctcactgcaacctccacctcctgggttcaagcgattcttcttcatcagcctctggagtagctgattacaggcatgtgctaccatgcccagctaatttttgtattttcttggtttgggggagagagtcttactctgtcgcccaggctggagtacaatggcgagatctcagctcactacaaactccacctcctgggttcaagcgattctcctgcctcaatctcccaagtagctgggaatacaggcacctgccaccatgccctgctaatttttgtactttttagtagagatgggaccatgttgatcaggttggtcttgaactcctaacctcaggtgatccacctgcctcggcctcccacagtgctgagattacaggcatcgagccaccatgcctggccaatttttgcatatttagtagagatgagttttgccatgttggccaggctggtcttgaactcctgacctcaggtgtccacccgccttggcctcccaaagtgctgagattacaggcgtgagccaccgtgcccagcccatgagaactttttttttttacatatacaaaactatgtagtctccctgactacaaatcctgaaataggtacaatttcagttctcattttgcaggtgaggtggctgagactgagaattgcaaacgagttgtgtatggtgtgcaaattttcactcacagctgtgctcgcaacccccatgtcctatctcccttccaaaaagtacctgtggctgggtgcggtcactcacccctgtaatcccagtcctttggaaggttgaggcaggaggactgtttgagcccagaagttcccgaccagcctgggcaacaaagaccctgtctctacaaaaaaaattaaaattagctagtatggtgcctgtggtcccagctacttgggaggctgaggcaggaggatctcccgagcccaggagtttgaggttacagtcagctatgattgtgtcactgcactccggcctgggtgacagaatgagaccctgtctcaaaaaaataaaaataaaaataccccaaatacacccccaccactaccaaaaaaaaaaatacacttgtgccagatgaaatttgttaagaaaaagtatccatagaattttaactttaatctgctttatgcagatttttggcttgaatctggggtaagaactgttagccctgttgtacagatgaggctgctggtgcctggcaagttcccgcagccagcaaacccttttatcttttttttttttttttctagacagagtctcgctctgtcgctcaggctggagtgcagtggcacgacctcagttcagtgcaacctctggctcccgggctcaagcaattcttctgcctcagcctcccgagtagctgggactacagccacacgccaccacgcccggctgatttttgtatttttagtagagacagggtttcactgtattggccaggctggtctcaaattcctgatgtcacaatccaccgcctcggcctcccgaagtgctgagattacaggcatgagccactgtgcccagccttgcatttttcatttgtaaaagttatgtcagtgggttttttttccctttcctacctactaggccattttgatttttttttttttttttttttttagttttggcttccttgctgataattccaagcttttaaaatttttaaacagtttaaaataaattttgtattataatctgtgattgacagtttcatcatgtgaagcctatgtgggtgtttttgttgtttctgctggttcttattcatattatttccatttgtttggttatttgtgtactactcattacctgaaaaattatttgtggtgggctgggtgcggtggctcacacctgtaatcccaacactttgggagaccaaggcgggcagactgcttgaggtcaagagttcaagaccagcctggccaacatggtgaaaccccatctctaccaaaaaaaaaaaaaaaaaaaaaaaaaaattgctgggcgtggtggtgggtccctgtaatcccagctacttgggaagcctaggcagtagaatcgcttgaaccggggaggcggaggttgcagtgagctgagattgtgccactgcaccgtagcctaggcaacagtgagactccatatccaaaaaaaaaaaaaaaaaaaaaaaaaaagccaggcgtggtggctcacacctgtaatcccagcactttgggaggccaaggtgggtcaggagttcaagaccagactggccaacatggtgaaaccttgtctctactaaaaatacaaaaaattagccaggtgtggtggtgcgcacctgtagttccagctacttggcaggtgaggcaggagaatcacttgaacccaggaagcagaggttgcagtgtgccgagatcgcgccactgcgctccagcctgggcaacaagagcgaaactgcatctcaaaacaaacaaacaaaaatatttgtggggcttctagatgacagttccttccacaggtggacttgtgtttgtttctgccagacatgtcagctagaagtaccctgtatcacacaggacgtgaacctggctgcgaacctgtgccgagggccagtctgtgaccacagattatcagaatctttctttttttttcatttgatttctgcctcttgaatacctcttcagtcttccgggtcatccttacctgagcttgtagctctctggaatcccagttcctgcagttgctcactgtgggctggctttggacttgacttttgcctgctccttccagtaaggctgccaagtaggaaaccccagtgtgtccacatcagcaaacaccctgagagcaaatgtggcttcagagccccacatatcattcttttttttttttttttttttttgaggcggattcttgctctgtctcccaggctggagtgcagtggcgcaatctcggctcactgtaagctccgctccccgggttcacgccattcccctgcctcagcctcccgagtagctgggactacaggtacccaccactacacccggctgattttttgtatttttagtagagatggggtttcactgtgttagccaggatgatctcgaaccgcccgccttggcctcccaaagtgcttgggattacaggagtgagccaccgcgcccggctcccacatatcattctcttaactatttggcgtggtgggtctttactgtattttattggctatttgatcctttgaagggcatttttttttcagttgttctcaacaggaaggtccgaataatctaactcaccctccccacaagattcaaacccaggtcttattgattctaaaatctaagcattgaatcactaccataatgtatcctagtcctctggaaattctgatttccggagaagaatgtcagagacttagctgcctctcaatatccatttttcccttcctttaaactgaaaatttaagatatccagctgggcgtggtggctcatccctgtaatcccagcactttgggaaactgagatgggtggattactggaggccacgagttcgacagcagcctagacaacgtggtgaaaccccgtctctactaaaatacaaaaattagccagctgtggtggcgagtacctgtaatcccagctactcaggaggctgaggcaggagaatcatttgagcccgggaggcagaggttgcagtgagccgagatcacaccactgcaccccagcctgggtgacagattgagactgtctcaaataaataaataaaaaattaagtggctatttaaaaactttaattacagggatttttagtaaagagtgttttgttgggcatattgcacccagctaaaagactgcatttcctagactcatgcagcccttctgtggctaagtctgacgggtgagatgtatatagaagcatagtgtagtgcttctgggaggaagggggcctcccttccagcaaaatggtgatagtaaaagcaatataatcttggctgggcatggtggctcactcctgcaatcccagcactttgggaggccgaggcgggcggatcacgaggtcaggagatcgagaccatcccggctaaaacggtgaaaccccgtctctactaaaaatacaaaaaattagccgggcgtagtggcgggcgcctgtagtcccagctacttgggaggctgaggcaggagaatggcgtgaacccgggaggcagagcttgcagtgagccgagatcccgccactgcactccagcctgggcgacagagtgagactccgactcaaaaaaaaaaaaaaaaaaaatttaaaaattagctgggtatgtggcgtacacctgtagaaaacccagctgcttggcaggttgaggtgggaggtttccttgagcccaggaggttgctgcagtgagctgtgatcataccactgcactccagcctgggtgacagagagagaccctgtctctaagggaaaaaaaaaaaaaaaaaaatcttgttcaagctactactattttgagatttttcaaatccaaattgacacagatgagaagagtaaaaaataatctcaggctaagggacttggctagggatcccttctctttccactttttccatcccccatacacaggcctacaactcccctctcttcccaaaccctcccttcacaacacacaaaccagtctgcacacagccttataaatattgattttatagaaaggaccaattcaaaattggtcagatgccacacgctagaagcttccagaaccacgatggaaagaaaaaaaagaaaacaaaaaacagagagaacaaacaaaaataccccagaccaaaatgcctgaaaaatcaaggtcctggttgaccaaaggattcttaaagaaacatgtggctggggtgaggagaccccaatgcctgaacgagaccccagagtggaaggaaaaacaacccagaaatgcaaatccgaagtccctgcccacggggcccccccacgctgtcaaaagcgaggcaaagggcttcacagctttatgggggtggggttgatggcagtagcttaaataataacgggaggaggagggtttttatacttcagctttttttttgtctgcccccctcttcctctacgcggaagaggagagactggtagcttgaggttaaggagaaaacagtatttcccccccacttctttaataggcaaaccatctagaaatggactgtcataaaaaaatgccagatcccacctgtgacctgacagcccccaattcctagagaggtgagagctgtcgtgtggcaggttaggagaggtgccaaccttgggcgatgcggcttcttgggaaataacagctccagcgagaaagaattggggtgagggagaggatgggggccagaatggggggacccttaagtggtaccaaaattagctgccgtctgctccctgctggtgggtccttggggtggaaagcatggcagggagggggttggggctgaatggagaagaaagtgagatgctgataaaaaaaaaaaaaacacccttctcagagggtccacggccctggttctgaagagtagaaaatcaacaggatcaagcagagggctttcctgggtcacccctgctgaaccccagctcagttccggtgagggatcaatgctgcctggagtaggggaatgggcaggcggcccagtccggaccctcggctcccggggggagaggggaggggtgggcgtggtgggctctcccctcccctcccccggcttcacctcccctcctcccggccggcccggcccccgcctggcccattgcagggcagcacccagttgttatcgtggaggcccaggcggcagccgggagtctcgcggtcggctcgacggcagcacatccagtaggaacgtccgtaaggcaggtcatggtggtagggcttggggtgccagcggcagagcgacacgtcgcccttctcgtatctcttgcggcactgtttgcacggatcatcgcggtagagcgggtctcggctccagcgcgagtctgtggcccgcacgccaaacgcctcgatgatgcccttgaagtggtggcaggtgcacttgagggcggccagcgcgcgcgtgggcaggaagctgaagatcttgaccagcacgtgctcgggcagcagcagcatgtactgtcgcggctccagcagccgctgaatcttgaagcggatctctaggaagtcgtgcgacacgtgccggtacaagcggcacagggaggtgtccgccgtgccctcggcatcgtctgggccgggcgcagtggccggggagtcggccgggggtggctccgggggcccgtccggcccgcggttctggagaaagaagagctggcccggaggcggcggttcctccgggctgaccgtcaggcacacagtctcctccttcacgttcttggtgccgtccttgccaaagaagatgcactcatctaccacgcccgtcaccaccacgtccacgtggaagcctgacgctccgcagtcccgggcagggggcggagggggcgccgggggagtgtcctcaggcctggcgggtgccgggctgtcaccctcactggcctcatccgccctggccagcaggaactccacgttgctggggagggcatcccgcgaggggctgatgagctggtataagtcacatgtgatcttgtccttggctcgggccccaggacctgggctgccagggtaggcacaaccaggcctgcccccgcccccactgggcaggccgctgtctggtgcacggggctcccggccgttggagatgcggaaggcgatgcgcacctccccagggcctggcccgggccgctcttccttgcggaggcccttggtgggagggctgtccctctgcgcttcaaagtgggccacggcctcggctacacggctgcagtccccaccaccggaccgccgttcagatcccacccccttggccggtccaccttgctcggcggacacaaagactacaggcgctggggtggtcggtcgtgggtagctctgcagggccagggctgcccgctgttccaccagggccaccatctcggccacagagagcaggtccacgtcctcaccggctgaggcggggccctcctcagcagcaggggggccctcccggccccctgggtcaggaggagccttggtggggtcaagacagcgcctccgccgcttggccttggagctatcgctgccccagtgccccttgaccttcatggagctggcccggctgcccccaccacactggtgggccacaaagaaggccaccttctcctttgtattcccgggcttgatgacataccacgtgtccaggaggactcgaccctcatcaccagcagctgctgctgagaggagcggagccggctgggaggcagggacctcagtggccaaggcgggtggtgtgttctctgagtgggcaggcccatggtctggctcggccccgccaccaggctcagggcaggctgatggcttgagggccgcagaaggcgggcgtggctggttctgtgagtaggtgccaaagggccgggggcaccatagctggaagggcaggaggctcccacggtccatgctgggggatgatggcagacaggctgggcttcagcgcatctcaggacctaggtggtggtgggaggctccacatgccacctggagacacgaagaggaggttggggagctagggggacagcctttcttcccaggaccaccccaacctccacctctccttagaccaaaccagaccatcaagaactctattcctggctgggcgcggtggctcacgcctgtaatcccagcactttgggaggctgaggtgggcagatcacctgaggtcaggagtttgagaccagcctggccaacatggtgataccccatctctactaaaaatacaaaaatgtgctgggcgtgatagtccacgcctgtaatccaagctacttgggaggctgaggcacgagaatcgcttgaacctgggaggtggaggttgcagcgagaccagatggcaccattacactccagcctgggcgacaagagcgaaactccgtctcaaaaaaaaaaaaaaaaaaaaaaagaactctattcccactgccatgctcaggtgagcagacagaggttgcagaggggatgagagatgcccttttaacttgcagagcgggaccctaactggcagcacgcaccaaccccataggtcctaccccactgtccaactgcctttgcccacaatccagaggcctttaaactgccataacttttacacttaagtgaaaggaccactgacagacaaggtcctttttctatttgctcactcagtagctcgttcctgaaaagacagaaattcccagccccacccacagctatggctgcttaaacccacagagagaggaacgaaatgcgctgggatggggatgaaaatctgaggtcagattcagacaagcacttaagaaatcggcttttctttttttttttcaggtagtggggcttaatgagaatttattaaagctgtgtgtcctcagtcagaaaaatgcacacccttgcaaagacagtacaggggattccctaaagcacagccgtggacccgcggagtaagagggcctgttctagagcctaggaggagttccaggctgcagggagcaatgatggcaccactgcactccaacccgggtgacagagtgagaccctctaaaaaacagagaacaaagccgggtgtggtggcttgtgcctgtaatcttagcactttgggaggccgaggtgggcagattgcttgagcccaggagtttgagaccagcctgggcaaaatccatctctacgaaaaaagatacaaaaattagccgggtggggtgtggcgcacctgtagtcccagctagttgggaggctgaggtgggagtatcgcttgagcccaggaggtggaggctgcagtgagctgtgatgctgtgatcataccactgcactccagcctgggtgactgagagagaacccatcttgggaaaaaaaaagaaagaaaacacgagggtgcctgttctagcctagctttctcctcaagctgcacacagataaacagaggctcagagtggggaagggtgacatagctaagattacagtgggtccggagcaaaaagaggctctcaacttgatttctggactcttcaatttagggctctgttaatgactattttattttggaatgacttgatgtgaatgacctaatctggaggcaatcttgcgcatgagtccgacatgatcactttcactgcagtttgaacctactaagtaacatatgcctcaatctttctctggctcatctccctccagacagctcaaaaccaaaatgaccctttaaaccttgaaacttccacatgcctacaggccagagaggtcagcaaactatggcccagaagcctaatccagctcgctgtctttgtaaataaagttttattgaaacatgctcatttgtttatggatgctttcatcttcaacagcagagctgaatagcagaacaaagaccacatggcctgcaaagcttaaaatacccattatctggctctttatggaaaaagtttgccaactcctgcagtacagaccatccctctaaattcaaacaattccaggcctggcacagtggctcacacctgtaatcccagcactttgggaggccgaggcaggcggatcatctgatgtcaggaattcgagatcagcctggctaacatggcaaaaccccgtctctactaaaaatacaaaaattagccaggcgtggtggtgcgcgcctgtagtcccatctactcaggaggctgaggcaggagaatagcttgaaccgggaggcggaggttgcagtgaactgagatcttgccactgcactccagcctgggcgacaagagctaaactccatctcaaaaaaaaaaaaaaaaaaaagaaagaaaacaaaacaaaatccagacagcctccaagcactcacaggtaccagtaaacacagagaatccccatgtcaagaatctttatctccactccataatccccaatcccacctacccctcaaatacttacagtccctgctgtaatctcagctcagtgttaaaaatatcactccacagcctccaaaacctatagatggctgtttaccaaccaccaattcacatacatgttgagtatctcaaatctgaaaatccaaaatgctcccaaattcagaactttttgagtgccaagatgacactgataggatatgctcattagagcatttcagatttttcagacttggcatactcaactgataagtataatgcaaatactcaaaatccgaagaaatccaaaatccgaaacactttttagtcccaagattttcgggtaagggatacttgacctgtataaccaactgcccagggaggcaggctaacacagcaaaagccagtctctacagatgccatcctgctacaacctggccaccccctcaagtcccctaatcagttccaaccttacccccagcatctcaatgtcctcccccaaatatcgaaaagctttcaaatactactttaaaccaccgaacctaaaaatatcctctccagcactgaagggccgaatctcagtcaatctctcacagatcccaacacagcaattccccaaactatgtcataaacaatcactctcccggaatcctatactccccccaaccctcctccattatctcccaattccactagaagcctccaacagcagacgaactctttgaaaacacaaaagctccctaacactttaagatgaatcttaaaccataaaaatgtttcacaaagccaaaaaaaaaaaacaaagaaacctcacaaatgttacaatagcagacatgtgcttactgcacgctcgctgcgagcttactaggtaggtactgcgctaacaattcctaatcctcctcggtccctaggaagcaggtagtgttattaatgcctagttcccgatgagacacaggtgaaatctcctgtccgggttaagacaggtaggaagtcaagacgcgagcccagacattccacctccaggactggtactctcgggctctttgcttctgtctctccgggagctccccaaattctatgcccaacaaacactccaaaacacaaagggaacccgatcccgaaaacacaaccgaaccttccgcattacaaacgaacccaaactccaaggtgccccttaagcgcgagagaaccccaaaagtatcccctaaacccacgttaaaacttccccaagccccagaacattttgcaaatggaaaaggaacccccaaatcttgtaaccgcccccccaaagaaatcttccaaacccctcaggtgaccctcgaaacctacacacgcccccaaagagccctcacccgcagcccccccaggcggcgggagaaggctgcagcccacacgcatgcgcgcgaaaggtaaaagggcccgccccctcgctccttccctccggccaccgcgcgggcagactagcaactagcttccctccgcccttttgttgacagacgcgcgcgtgacgctctcagccaatgagcggccgccattcggggccgtgcccatataaggcaggccttggcgaaggggcccaacttcgaaatagggaggagtaggcgagaggtgatgggagtgggtggtggggtagacacagccggatgcaagggagcgtggaacaactcccaacgtccagctaaacggaacaaggtcagggcaaaggccacgacactccaggggaggcttattacaccacgtcccctcgaacagaagccctgattgacgcttgagacttaaagggccaggcagcccggggattaagaacaccaaggcggaaggaagcaggcggagagatcagagtatccagctttggttgggaactgtgggggcggggggcgggctgaggatttccgcggggggaattgggcatcgggataaccccaccctgaaaaacaaatggacagaaccctacgaaggttcccacggcaactgaaaacaagcctctaggcctggcgttcaaggctcaagccgtgtagccattcggagctgccagttcagcctttccaaacaggcgccccaaacctgcctcacttagtacaaaagagcagccagaaaagtcctgttaaagcacagtcctataaacctgaacccgtccctatcctggtgagaacctgccatggctccccagtgccctctggaaaacacccaggtaccccacctgtccagtcgcatccctccccactcctccgccccgcaggcaataccccagtgcaccctggtgggcacctgatctggcatacatagaatactcaggacccatctgatccccggtaggagtgatcgtctccacggtatggatgaagaaactgacgcagggcaggtctcctgaccacaaggtcacacagagctggagtgtgagctggagcagggatatgaagccagggaatctgatttcctagtcactgtgccctactgtttcactatatattccctggggtttcagctcgaccacccctcctctaagaagctgacacccccaatccccctaggccaggtcaggcttcacccagggcgtccatgcggtgggctcattgctgtctattcctcaaagttaccgggctcttgccttccctggtctctgcatttgctgttcccaccaactgcaatacattccccctctgcaaggctcaattccttacttcattcaggtctgtgttcaaatgcagttttattagagaggccttctccaactcccttcctggaaatcacccacctgcccagaggggacctctgggttccctcttccctgcctactctgggtcatcgtctggggtgggtctctctccaggcctgagacaggatcttctaactcccccacactgagcccagcataaggccctacactaggtcagccttcagcaactactccatgaaaatctattcattgtaaaacattgtgaaccaaaaatatggaaaatcaaaagacggcaaaaaactggctgggaaaacacgaaccaagagacaagtagaggagtaacattaccccttaaaaaaaaaaaaaaaaaaacttggccaggcacggtggctcacacctgtaatcccagcactttgggaggcagaggggggacacaatcccttgagctcaggagtctgcgaccagcctgggcaacatggtgaaaccccatcactacaaaaaatacacaaattagcagggtgtggtggcacgtgcctgtagtcccaagtactcaggaggctgaggtgggaggattgcttgagcccaggaggtagaggctgcagtgagctcagatcaggccactgcactccactctgggtgacagcacgagactgtcttaaattaaattaaaaataaattaaataaataaaaaataaataaactgacaaaagcaatggatgatgacgaaacaaaatgaccaattatttacttctctacatgagtccctagggctgggggagggaggtggaagtgacccattatacacaaaagttctcaacatacatgatccaaatactatggcttccaaatagataaagcaaaaaacgaccatctctacacatgacagccataaacttacaaatgacaagggaaagtttgttaaatccacaattgatatgggaaaacaacatatttctaagaaaagactgcttgggaaaattagtaaggacctgaaccactcaatctacacccttggttgaatgcccccaacaattaaataatccacatatttacatccctagcatacatacatacatggtgcatttgcaaaaacttgtctctgacattcactgtggtcctgcatgctggccattgttgggcgctggaacacacaggtgacactgagctccccaggaatggctcatgggaaaggggtcagacatccaaacaaacagtcagaaccaacatgaatatattagaaaatgataatcacaacagcagtcaatactcgagcactctacaaatatgaacttgtttgattcttctatctcctatttttaatttcgtgttgaagataaggaaactgaggcagagaatggctaagtaattgccctcatttatagctttgtagcagaactctgtttttgtgagtgtgtgttttgttttttgttgttttctgagatggtctcactgtcacccaggctggagtgcaatctcgcctcaacgcagcctcaatctcctgggctcaagtgatcctcccatctcagctgccttcttttttgtttttttttttaagacggagtcttgctctgttgcccaggctggagtgtaacggtgcgatctcggctcactgcaatcactgcaacctctgcctcccggttcaagcgatttgcttgcctaagcctcccaagtagctgggactacaggtgtgcgccaccatgtccagataattttttcatttttagtagagatggagtttcaccatgttggccagactggtctcgaactcctgacctcaggtgatccaccccaccttggcctcccaaagtgttgagattacaggcgtgagccactgcacctggcctaatatttgtatttttagtagagacagggtttcaccatgttgatcaggctggtcttgaactccttacctcaagtgatccacccgcctcagcctcccaaagtgctaggattacaggtgtgagccactgtgcccagcctatcccagccttttgaggagctgaaaccacaggtgtataccagcacgcccagctaatttttacatttttttgtactgatgaggtctcactatgttgcctaggccagtcttgaactcttgaactcaagcaatcctccaccttggcctccccaagtgctgggactacaggcaggagcaaccacaccaagtcagaacttagaatcaaagatcagctgactccagagctcaaggtctaaactacaatataaacatcatcctggctgggcgcagtggctcacacctgtaatgtggtggcaggctcctgtaatcccagctactcaggagcttgagacaggagaatcggagaattgcttgaacccaggaggcgtggctgcaatgagccgagattgcaccactgcactccagcctgggtgacagagcaagactctcagccaaaaaaaaaaaaaaaaagaagtgaagcggggaaaaaaacaacagaataaaccaaacaaataaggaaaaataggccacgtgtggtggctcgcgcctgtaatcccagcactttgggaagccgaggcagacagatcgcttaagccaatgaatttgagaccagcctgggcaacatggcaaaaccccgtctctactaaaaatacaaaaattagccagcatgtgcctgcagtcacagctactcgggaggctgaagtgggaggatcgcttgagcccggaagtggagggtgcagtgagctgagattttgccactgcactccagcctgggtgccaaagcgagaccctggctcaaaaacaccaaaacagaaagaaagaatggaaaaataatgataaatggtaaagcgtagatgtctgaccccaccccacttccccatccccacccctagtcagatgaccccgctccccatcacagggccagggtcacacccagcacaaggcacttgcccagttacatgggaattggtggcaggacaccagggtttcgttcctggtcctgttcctttttttttttttttttttgacagggtcttgttctgtcacccaggctggagtgcagtggcacgatctcggctcactcgaacctctgcctcgtgggttcaagcaattctcctgcctcagcctcccaagtagctgggactacaggcgcccgccaccacacccggctaattatttatatttttagtagagtttcaccatgttagccaggatggtctcggtctcctgacctcgtgatccacccaaagtgctgggattataggcgtgagccaccacgcccggcaccaccccaccctttttttttctttttttgagatggagtcgtgctgttgcccaagctggagtgcagtaacacgatctcgtctcactgtaacctccacctcccctgcctcagcctcctgagtagctgggattataggcacctgccaccatgcccggctaattttcgtatttttagtagagacagggtttcaccatgttggccaggctggtcttgaactcctgatctcagatgatccacccacttcccgtagtgctgggattacaggcatgatgcaccgcgcccggtccctgttccttctatgccctaccctgctgctcctttgtccagaatcctgactcatccatacctcacccatggcttgttggccttagagtccactgggtcccctcccttttaagttttcctttctgactaatggtccctgaaggcaggaatcatccaagccctgagatcctggaagcagacaggaaccagacagggcctgctggatcccagctttcccacctctggcagtatgacctcaggcaggtttttcagccccatgtgcctcagtttcccccactgtaaaatggcaataatgacagcatccacccatgggctggctgaccatccgctgaaacaaacccagcagagcacctggtaccagtttggcactgaggcgtagctcacacctgtaatcccagcactttgggaggcccaggcaggcggatcacaaggtcaggagatcgagaccatcctggctaacacggtgaaaccccgtttctactaaaaatacaaaaaattagctgggtgtggtggcgggcgcctgtagtcccagctactcaggaggctgaggcaggagaatggcgtgaacccgggaggcggagcttgcagtgagccgagattgcgccactgcactccagcctgggcgacagagccagactccgtctcaaaaaaaaaaaaaagtgggctgggtgtgatgactcatgcttgtaatcccagcaccttgggaggctgaagcgggcacttgaggtcaggatgagaccagcctggccaacatagtgacaccttgtctctactaaaaatacaaaaaattagttgggcatagtgacaggcgcctataatccctgctactcgggaggcaaaggcaggagaatcgcttgaacctgggaggtggaggttgcagtgagctgagattgtgccactgcactctagactgggctacagagggagactccatctcaaaaaaataaataattaaacataaaaattgaaagtgaaggctgtgggtggtgactcatgccttaatcccagcactttggggggccagggcagaaggatcgcttgagccttggagatcaagaccagcctgggaaacaaagtgagaccacatctctaaaataattttttaaattggctgagcatggtggcatgagcctgtagttccagctactcggggaggctgagacaggagaatccgctgggcccaggagtgtgaggctgcagtgagctatgatcatgccactgcactccagcctgggcaacagaggtgggccctgtctctaagtaaataaatgaatgaaacacttgtggattacttagggaatgaacgctaattttccagaggaggaaactgacgtccaacgggatcaaattacttaccctaggtcacacagctgatgagaggtgaagccaggactcaaagctgggcactctggctttttcattttatttttgttttgttttgctttttgtttgagatgatctcacgctgtcacccaggctggagtgcagtggttctgtcacagctcaatgtagcttcaacctccttggccgccaagcccaactaattcttctttttttttcttagacgcagtctcactctgtcacccaggctagagtgcagtggcatgatctcagctcactgcaacctctgcctcccaggttcaagcaattcttctgcttcagcctcccgagtagctgggactacaggcgtgcgccaccacgcccagctaatttttgtatttttagtagagacagggtttcaccatgttggccaggctggtcttgaactcctgatctcaggagttcaagaaaaaaaaaagaaaacttgtgcttttaggagtaagacagctttaccatagcagttagaaatacatcattaaacgtggtaaaaaatacaatttttttcttcgtttcctagtacatgtcacaggttttgaaataaagatggtaaaaataccattttgtatgagtaagcttcagacaagcacaggctgaaaacaaatttaagatttcaagaaaaggcaaaataacttggaaagcagacaaatgctctaagacaaataaatgaaggcaacggaaaacaaaaaagtgtcagatcaccccagggtggccagatgtgacacataggatcagggacaagtgagagactggcaacttttccccaaaccaataggttttcagataattcaatgagggctggagacagaatgttaaaaaatccatgaaagcagtgacaagcaggccaagctggcataaggggctgaaaatgaattgggaatagagaaacccaaacttgaaaatgagcacaaatgctcgcatacttgcagaactgccctaccattatgacaacagcaagttccccaatggcagggtcgagtctgcacccaatacaggcgctggcacatggtaagtgctctattaacacttgtgggctgggctctgtggctcatgcctgtaacccagcactttgggaggccgaagtgggaggatcacttgagtccaggagtttgagagcagcctgggcaatatagcaagaccctgtctctacaaaaaaaaaatttcttattttttctgttcgagacggaggcctgctcgttacccaggctggagtgcagtggtgcaatctcagctcactgcaacctccgcctcctggggttcaagtgattcttgtgcctcagcctcccgagtagctgggactacaagcacacgccaccacgcctggctaatttgtatttttagtagagatggggtttcaccgtgttggccaggctggtcacaagctcctgacctcaagagatctgcccatgtaggcctcccaaagtgctgggattacaggcatgaggccactgtgccccatcaacaacaaaattttttttttaattagctgggcatggtggcaagcacctgcagtcccagatactctggaggctgaagcaggaggatcacttgaggccaggagcttgaggctgcagtaagctgtgactgcaccactgtactccagcctgggcaacagagacaggccctgtctctaaataaataaataggctgcggtggctcaaccctgtaattctagcactttggaaggctgaagtgggtagatcacttgagctcaggagatcgagaccagccttggcagcatgtattattcatctctacaaaaattacaaaaattagccaggtgtggtggcatgcccctgtagtcccagctattttggaggctgaggtgagaggatggcgtaagatcaggaggtggaagtcacagtgagccaagatagtgccactgcattccagcccgggcaacagagccagaccctgtctcaaaaaataaatgaacaaataaataaataactaaaacacttgtgggccaggtgcggtggctcacacctgtaatcccagcagtttgggcaggtcgacagcttgagtctcattgttcaggactagcctaggcaacatggcaaaaccctgtctctacaaaaatttttttaaaaattagccgggcatggtggtgtgcgcctgcagtcccagctacttggaaggctgaggtgggaggatggcttgagcccgggaggtagaggttgcagggagccgagactgtaccactgcactccaacctgggcaatagagccagactttgtctcaaaaacttaaataaaaatgaataaataaacacatggactacttaaggaatgaaccccattttccagattcaaagttgggcactctgactccagagtgcatttttctccctgttttctttttgttttgttgttgctttgatttttttgtttgtttgtttgagatggtctcgctctatcacccaggctatagtgcaatggggcaatcagagctcactgcaccttccacctcctgggcccaagtgatcctcccgcctcaacctccagaggtgctgggactataggctcatgccaccaagcctgactaattttttaaaaaatttatttgaggctgggtgcagtggctcatgcctgtaatttcaacactttggaaggccaagacgggcggatcatttgagcataggagttcaagaccagcctgggcaacatagtgagaacccgtctctacaaaaaagatacaaaaattagctgtgtgtagtggcatgcaactgtagtcccagctatactcaggaggctgaggtgagaggatcacttgagcccgggaagttgaggctgcagtgagctgagatcgcaccaccgcactccagcctaggagacagagcaagactccatctaacaacaacaacaaaaaaaatggctgggcacggtggctcacacctgtaattctagcactttggaaggttgaggcgggtggatcacttgaggccaggagtttggcaccatcctggccaacacaacgaaatctcgtctctactaaaaatataaaaattagcagggcatagaggtgtacacctgtaatcccagctacttgggaggctgaggcaggagaattgcttgaacccaagaggcggacgttgcagtgagccaagatcatgccactgcactccagcctgggcaacaaaacgagactgtctaaaaaaaaaaaaattgtttgtagagatgaattttccctgtgttgcccaagctgatttcaaactcctgagttccactgatcctgccaccctgttaatcccagcctcccaccttggcctcccaaagtgccaagattataagcatgagccaccttgcccagcctcagtaccttttcttgaaagaataaaaatcatagaaagacctcacacttattgagagcataatacaccccaggcattttatatatgccacctcatcagttaccacgtcaactccttacgagaagctcagagtttaaatgtggtcccatttttacatgagaatactgaggctggctgggcactggggctcatgcctgtaaccccagcactttgggaggcctaggcgggtggatcacttgaggtcaggagttcaagatcagcctgggcaacgtggtgaaacgctgactctacaaaaattaggcaggtgtggtgacacacgcttgtagtcccagctactcaggaggctgaggtgggaggatcccttgatcctgggaggtggaagttgcagtgagccaagatgatgcccctgcatgccagccagggcaacaaagtgagaccctggttcaaaacaaaaaaaaagaaaaaaaaaaagaggtcggagcagtggctcacgcctgtaatcccaacacttagggaagtcaaggagggtgcatcacctgaggtcaggagttcgagaccagcctggccaagatggtgaaacctcatctctactaaaaatacaaaaattagctgggcgtggtgacacaagcctgtaatctcagctacgcaggaggctgaggcagaagacatcatttgaacccgggaggcggagattgcagtgagccaagatcacaccactggcctccagcctggacaacagtgagactctgtctcaaaaaaaaaaaaaaagggaaaagaaaactgaggcccagagtgggaatgcagcttggccaaggtcacacagcaacagaagcagggttttgaccctgcgcctctctgaagccagtgttttcaaccataagcttactatcacagccaatgaattaagcccagaaagctcacaataaaccaaactgtttcaaggtgaatttacaaagttgtcaaactgcccaatgaggccttaatgacccaaaagttaaacgaacaaaagcaaactaacaacaacaacaacaagaaaaacctagttagaaatattttctcttcactgaaacacctggagtaaggccagactgggtatttggcggggacaggaatgggaatggggacacactgagtttccttgttctttttttttgagacagtctcactctgtcgcccaggctggagtgcagtggcacaatcttggctcactgcaacctccacctcctgggttcaagagattctcctgcctcaggctcctgagtagctgggactacaggcgcccgccaccacgcccagctaatagagatggggttttgccatgttggccaggctggtcttgatcaaactcttggcctcgggcaatctgcccgcaatggcctcccaaagtgttgggattacaggcatgagccaccatgcccagcccacagattgagtttgtaagcacactctccagaagtcgtaattggatttaggagcccagaggtggagggcagggacatggtgacaacatgagagagaaaggagacagcctgacatcttccctcttggttcctctctactgccttctctttcccactgacattcaaaaacaacaactcacacgtactgagcccttccataagtattggagtaagggctcataaagtaagttccactatactgcattatcttcccgaaacttctcaccttcctagggttactgatcccattttataggtgagaagaacccaaaagaagaacccttgcccagggccaggcgtggtggctcacgcctgcaatcccaacacttttggaggttgaagcaggaagaccccttaagcctaggaatttgagaccagcctgggcaacaaagtaagacccgcgtctctacaaaaataaaaataaaaaattagccgtgtgtaataaaaaattagtcccagctacttgggaggctgaggtgggaggatcgcctgagcccaggaggttgaggctgcagtgagtcatgattgcgccactgcattccagcctgtctgggcaacagagcgagaccctgtctttaaaaaaataaaaaggctgcgcgcagtggctcacgcctgtcatcccagcactttgggacgctggggcgggcagatcacctgaggtcgggagttcaagacctgtctctactaaaaatacaaaattaaccagacgtggtggcgcatgcctgcaatctcagctactcgggaggctgaggcggagaattgcttgaacccgggaggcggaggttgcggtgagccaagattgcactccgcctgggcaacaagagcgaaactccgcctcaaaaacaaaacaaaactaaacaaaaaaccataaaaataaatatagggccaggcgcaatggctcacgcctgttaatcccagcactttgggaggccgaggcgggtggatcacctgaggccaggagttcaagaccagcctgaccaacatgcagaaaccctgtctctactaaaactacaaaaattagccagggcgtggtggcacatgcttgtaatcccaactactcaggaggctgaggcaggagaatcgcttgaacccgggaggcagaggctacagttagccataccactgcactccagcctgggtgacagagggagactgtctctaaataaataaataaaaataaataaaagacttgcctaaggtcatatagcaagtaaatggcagaactaatattctagactgctttgttcgctgtctctactcatcacattgtatatttcagtatggagagaggactaaattatagtgctgaaagcacagattctgagccaggctgccaagatcggaatcctgagtctagcaattaatgctggatagccttgggaaagttgcttaatttctctgtacttctgcttcctttctgtaaaatggagaaaataacagcacctacccctcaggggtgttatcagaattaaatgagttaatgtgtacaaacagctaaggacagggccaggcattttgtaaaacaataagcgttagctgtaatccacagtggggagcccctacatgcttctgagctggggtgtgtgcccagatcagtgccagcttttgagaaaacgcctctgggactggactggaaaggaggaaatccattagcacctgtaacccagtcacattccgggggcggagaacttcccaccaacagctctgagactgaaacttcacagcccagctctcccactaatagtaacgattttaatgactccctttaaccctgttctcagaggcatgcttgctgttcccatactacagataagggcactgaggctcacagatttgtccatggcacaaaggggtggaagaataggggatatgaatgctgtacttctcatagggataaaccattacactcttctaaattccaccggggaagtgagggtgcgaaagcctgtctcgatggccctttctggccgtattatcctacagttctgtgcctgtccagcttaccgggagtctctggcgggactagggaaattatcactacatccaggcccctaatttcacgctccttaccccaccctcagtcctggagcctaaacccacactctatcctaccactgatttctccctcctacctcctcaacttgccttcctgcccccaatccgatccagaggccccaacccattgcgtccaccgttcgcctgtcccttggagcttccagaccccctcactcatcctaaccctgatcctcataccctcgccgcaggttaagcccccatcgaaatcgaccccttcagggcctctacctggatgtccagcccagtctccaactcggggcccacttccccagctctgagcccctttacaatcaattccaaagctccactcccaccccacctccaagacccctccccaagccaccattcttctactactacctccggctcccattcctcccagtcctctcccccaggcaatctcccctcacccagccccttctttcgcccctgcctcttccccctcgtcacccggtcccgaacccccgtcccgactctccagcgcccccggcccgcgcctgggctctcaccatcgccgcgcgctgcatctccctcggctacgcgggtttcccccactcgctcctctccagcctccccttccgggttctcgtcccgaagcccgctgggaattgaagtccgggcagccacggactacatcccccagaaggcagcacggtcaagcttggaggtggggtaggaagcaaattaggcgggcggaggaaaagaacgactcgaactcccgggagacaaagccggggaggacttggcagcgcaagcgcagggtgcttccccgctgggcgcgctgggagatggagtctagccaggagggctccatttttgcccgaggcccttgggaagggaattgagaatattgcaatagggtgttggtgaggggtggagagttggggaagagcaaatttattgattcatttgtgccgatcaacacaatagctaacagctccttgtgcttttccaaactccttcccatccatccccttctttttttttttttttttgagacggagtcttgctctgtcacccaggctggagtgcagtggcgcaatttcggctcactgcaacctccgcctcctgggttcaagcgattctcctgcctgagcctcctgagtagctgggattacaggagcccgccaccacgcccggctagtttttgtatttttagtaaaaacggagtttcaccatgttggtcaggctggtcttgaactcctgacctcatgatccacccgcctcggcctcccaaagtgctgggattacaggcgtgagccaccgcgcccggcccgtcccctcctttcttacctcctgatttacaaatgagaaaattaagccttaggaggaaggaaagtcccatacattaggagttagtccacatcatagaatagcagctccacatcgctcgagcccaggagttcgaggcagtgagctagtgttacaccaccgccctccatgcagttcagcctgggcgacagaatgagaccctgctgcctcttaaaataaaagaaggccgggcgcggtggctcacgcctgtagtcacagcactttgggaggccgaggcgggctgatcacaaggtcaggagatcaagaccatcctggctaacacactgaaaccccatctctactaaaaatacaaaaaattagccgggctgggtggcgggtgcctgtagtcccagctactcgggaggctaaggcaagagaatggcgtgaacccaggaggcggagcttgcagtgagccgagatcgcgccactgcactccagcctgggggacagagcgagattccgtctcaaaaaaaaaaaaaagaagaagaagaagaagaagctccaggagggcagagatctttgtgtaccttgttcaagcacctagaacagcgtaaacatgtgttcagtaaatatttattgcatcggaactatatgccagacaccctacagacaaccctggtaggaattacaatcccaaatttataaggcagaaagagattaagcctcttgtcgctggcaacacagccaagaaaacgatttgaactgaaatgtattggatttcagggtttctactcttgactaggtcgttagatcatctccccttaagacgtattttccaggctgggtgcggtggctcatgcttataatctcagccgggagactggctttagtccaggagtttaagaccaaactaggcagcaaagtgagaccctcgtctctaccaaaaaaaaaaaaaaaaaaagcccaaatcttttattctttttctttcttttttttcctttttttttttttttttttttttgagacagagtcttgctctgtcgcccaggctggagtgcagtggcgataccagctcattcaacctccacctcccaggttcaaatgattctcctgcctcagcctctggagtagttgggactacaggcgcgccccaccatgcccggctaatttttgtatttttagccgagacggggtttcaccattgttggccaggctggtctggaactcctgacctcaagtgatccgcccgcctcgtcctcccaagaaggcccaattcaaatggccctcctctttgaatcctttcccaacgtattgttctctgcattaaccgagttcccgtctcaccggattctcatggtctcggaggttctcacggtcttctcgattgtactgggaagacagtggctaagttcccaccatctagcctggtgcttggcacacaggaggccctcatgaatcacgaactgaagggaaaaggtggaaatgggacatcatagggccagaagggacacaggcgagctcgctctctctctcttcctgagagttggcagttgaggaaacccagcctacttgggatgcaacggccctggaccacgcgggtcgtgcaggggcgtgaccgcttaaaaaggcgggtggctgagcgggcgctgattggtcacctagcggctcacgccgaccaaggccttgtcagaaggctcgaggccgagctcacgctgtgcaagacgacagggcccttcccgaggcgcgcgtgcgcacggccacttgcaccctgccctttcaaccccgtcgtctcgtgcccagcacatcttggctggaactggtaggggcgtggcctggcctcaggaacgcactcttgctctgctcctcacgcctcgcgcaggatcctcgcgccgggaggattcgcacccaaccccaagcccggttgggaacgtggtgtccgagaccgtctgggatccccgcgcgcacggccggcttcccgggacccgcgcgagacgctgtctgatcgggctccctagagtggggcccggagaaaccagaacggcgggggcagcctcacgccattttgcacgccctgaggcgggtgctggaggccaaggggaatggggcgcggggcagggggcctcccccagcactagctgggcttaggggaacccgggatccccacaggagcttccctcggtggggggctcaggggaatagaacatgctctgggtgcagggccacgggcgacggagtttgggtttgaagccgggggtccaggttcgagtttgaggaacggaagactctgtttgtgttgggaatccgggctctcgagttctgatctgggatctcgggatttgtgtctaggggtgactagttctggaatctgaagagcttgagttttgtgactggaagctttctccttggaatccagagatcccaatttggggatctggaagtcttagttctgagttatgatgtaacattttgagagtctggagcctgatttggggcaactgaagcctcagtatagatttagggcctaaatcccaatgtagagtatgaagctttaggatctggagtcgcagtttgagtctttagaagcacgttttagggcctggagtgcccacattgagtatgggagctccagttttagggtctggggtttcagagtaggacccacattcgagatctcagttttagggttggggccacaatttgagggacagtttggacgtctaagaggtcaatctggagaagtgagatttgtttcataggggcctggatttcttatcttaggatataggttcatagtgttacagcttgcagtctgtaatcttagtattaggatcatatttgaagatcagaagttgacagtttgagggtctggggtatctcagtattagaatttagggtttgtaggtttgggagggctcctttttttttgtttttgagacaaggtctcactttgtcatccaggctggagtgcagtagtgcgattttagctcactgcagccttgacctcctgggctcaaaccatccccccacctcaggctcccaagtagctgggactacaagcatgtgccactatgcccaggtaattttttttttttttttgtagaggtggagttttgtcatattgccaggctggtctcaaactcctgagatcaagcaatcctcctgccttggcctcccaaagtgctaggattacaggcgtgagccactgtacctggctttgggagggctccaaagtgaggatttaggtcctcattttgggactctaaagtattagttttagtgcctttttagaggtttaggggtttgtttttgtttttgttttttgagacacagtctcactctgttgtccaggctggagtgcagtggcttaatcctggctcagtgcaacctccgcctcccaggttcaagtgattctcctgcctcagcctcccaagtagctgggattacagtcgtgcaccaccacgcccggctaatttttgtatttttagtagagatggggtttcaccatgttggccaggctggtctcaaactcctgacctcgagtgatttgcctgcctcggcctcccagaatgctgggattacaggtgtgagctaccacttctggccaaggtttagctgtttaatttgggtctttgggcccataatttgttggggctagggactcttattttgggatctctgggtgctcaaaggagcatcatagggaagatgaagggtgcccatcagggttcctgcccatccttcctgcaatcccagaggtcactaatcattctttttccctctttgcagatgtttggttccagcagatacttgggttcctctgaacagcccagagctaattcactgggtcccagtgacaggtaagggcttgccccatctcccttatagccccagccactctcattgaataataataacaaaaacatttgctgagcatttaccgtttgctagactctttgccaaacattttgtttgtatgataactgttaatccatacaacaatctcatgaggaagttgtgtacaaagatgcctaccattttccagatgagagtactctgaggtgatcggcaaagatcattgcttatttatttatttatttatttttgagacagggtttcactcctgttgcccaggctggagtgcagtgttgcgatcccagctcactgcaacctccgcctcctgaactcaagtgattctcctgcctcagcctccccagtagctgggactacaggctcatgcctccatgcctggctaatttttgtattttttgtaaagatagggttttgccattttccccaggctagtcttcaactcctggcttcaagtgatctgcctgtctcagcctcccaaagtgctgggattacaggtgtaagccaccatgcccagcccatttctttttttatttttagggcaaagataacttctaaggtccttgcagcctgtgacattctgagtttgtttgttttcagagttagggtatcactctgttgcccacgttagagtgcagtggtggcatcatagctcactatagcctcggactcctgggtttgagcctgggcttgatcctcctgcttcagccttccgaacagctaagattacaggcacatgccaccacacccagccagtttttctatttgttgtagtgacagggtcttgctatgttgcacaggcctgtcttgaacttctggcctcaagtgatcctcctgtcttatcttcccaaagtgctggaattactaagccaccacgcccaactgacattctgagtgtctttctttctttcctttttttttaagacagagtctaactctgatgcccaggctgtagagtgcagtggcgcgatcttggttcactgcaacctctgcctcccaggctcaagcgattctcctgcctcagcctcccaagtagctgggattacaggtgcccaccactatgctcagctaatttttttgtgtgtatttttagtagagacagggtctcactgtgttggccaggctggtcttggactcctgacctcgcgatccgcccgctggagtgcagtggcgtcatctgggctcactgcaagctcaacctcccggattcacgctattctcctgcctcagcctcctgagtagctgggactacaggcgcccaccaccatgcctggctaattttttatattttttttagtagagatggggtttcaccatgttagccaggatggtctcgatctcctgacctcgtgatccgcccacctcagcctcccaaagtgctgggattacaggcgtgagccactgcgcccagcctttttttttttttttgagatggagtttcactcttgctgcccaggctggactgcaatggcatgaactcggctctctgcaacctccgcctcccgggttcaagcgattctcctgcctcagcctcccgagtagctgagactacaggcgcatgccaccacgcccagcaaatttttgtatttttagtagacatagggtttcaccatgttgttcaggctggtctcgaactcctgatctcaggtgattcacccgcctcggcctcccaaagtgctaggattacaggtgtgagtcagcaagcctggcttctttcctttttttttttttttgaaacaaggtcttgctctgtcacctaggctggaatgtggaatgcagtggtgcaatcccagctgactgcagcctcgaccttctgggctcaaacaatcttcccatctcagccccctgagtagctgggaccataggcgtgcaccaccacgcctggctaatttttgtatttttcgtagaaatgggtttttgccatgttgccgaggctggtctcaaactcctgggatccagtgatccacccagcctcccaaagtgctggggttacaggcatgagccaccacgcctggctctttctttttagacagggtcttgctctgttccccaggctggagtgcagtgacacgatcacagtttactgcagctttgacctcccagactgaagcagtcctcccacatcagcctcccaagtatgcaggaccacaggcacacgccactatgcccaactaattaaaaaaaaaaaaaattggccaggtgtggtggctcacacctataatctcagcactttgggaggccaaggtgggttgatcacttgaggtcaggagtttgagtccagcctggccaacatggtgaaactccatctctactaaaaatacaaaaattagctgggcatgatataatcccagctacttgggaggctgagacaggagaatcgcttgaacccaggaggcagaggttgcagtgagccgagatcgcgccattgcactccagcctgggcaacgagtgaaactctgtctcaaaaaaaaaaaaaaaattgtggacagggtctcaccatgctgcctacactggtctgaaactcctaggctcaagtgatcttcctgcctcagcctccaaaagtgctgggattacaggcgtgagccaccatgtctttacttcctttcttttattcacgcattcattcatccatcaagcacttaccaagtgtaatgaatcttatagagggaattttcacagcagattggaggttggatcagatttctccctccctccaaagtctggataaagaaaaaataaggccaaagttcatattaacccctaccatctcccccagtgactttccatccaactatctcttcattaactccaaaattaagcatctacggggttatgtcctgataaacccatcataaactgaaaatattgtatgtcaaaaatgcatggttgatggctcaggcctgtaatcccaacacttggcgaagccaaggtgggctgatcacttgaagtcaggagtttgagaccagcctggccaacagggcaaaaccccatctctactaaagatacaaaatttagccaggcatggtggtgtgtgccggtaatcccaagctactcaggtggctgaagcaggagaatcacttgaacctgggaggcggaggttgcagtgagccaagatcgcgccgctgcgctccagcaacagagcaagactcagtctaaaaaaagaaaaaaaagcatagctgattgggagctgtggcccagtgttgctgcccagcacagtaagagaagtatggcttctactgaatttgtatggctttcacaccattgtaaagtcgaaaaatgttaagtccgactgttgtaagacgaggactgtgtgctttgtttaggttctctacctagatactatgctcagaagaagcaccatgaagaaaatgaagaatgcctatcctgctgcccattcctcctggaattttagagttgccacaattcatactttcatccccctttctagatgtgggggtccttgtattgataaagactgttagttgcgaagaacagaaacctagcaaaaactggcttaagcataaaaagggatttattggatcatttaaacaaaaaattcagggatgtcggccttggctggttccaggatggaggttaaatgatgttgccgggaatctgcgtctcttggctctggtattgtctgtgttggcttctgtctcaagcaggttctccctttgctttatttatatattttatcttattgtttgtttgtttgagatggagtcttgctctgtcacccagactggagtgcagtggcatgatagctcagcgcaacctccgcctcctgggttcaagggattctcctgcctcagcctcccgagtagctgagattacagacatgtgctaccaggcctggctaattttctcatagttttagtgaaaacggggtttcaccatgttggtcaggctggtctcgaactcctgacctcaaatgatctgcctgcctcaacctcccaaagtgctgggattacaggcgtgagtcattgtgctcagctgcaggttgtccctttggaagggcaagatggttcccagcagttccaggtctatatcttgccaactccatatacccagaagagaaaacatctttctaagattgattgactctgattggccaaacctaggattaccactccaaccctgaaccaatcactgtgactattcttggcaggaccttggttttgtgctccctagtggaaggggaagataaggtcaacccctccgaaccacatggactgagaatggaggagaaatggttgctcaaaggaaaactgaggtactgttaacagaaaaggggggattggatgttggccaagcaaaaacatagcccattgttcaacacctcttacccctaaaatcattctgacaaatgactgtacacacatgctttctttcttcctttttttttttgagacagagctttgctcttgttgcccaagctggagtgcagtggcgcaatctcggctcactgtaacctctgcctctagggtttaagtgattctcctgcctcaacctcccgagtagttgggattacaggcacgtgccaccacggccagctaattttttgtatttttagtagaaacagggtttcaccatgttagtcaggctggtcttgaactcctgacctcaggtgatctgcctgccttggcctcccaaggtgctgggatacaggcgtgagccactgcacccagccccacacgctttcttgaactaacatttcatgaacactccctatgtaccaggcactatacgaaacaccttccagataagatcaaggttttcctagccacctccattttgtaaaggaggaagaaacaggcacagagaagtgaaagcagttgcccaaagtcacacagcaagcggaggaactaggatttgaatcccagtctttctgcttcaaaaactggagcttatatatcaacctttatgccacctcctgggactgtcccctgctttgtcccactttggggcagctcttactcttacatccctacacactattaaaacaaatgaaggccgggcacggaggctcacgcctgtaatcccaaaactttgggaggccaaggcggatagatcacgaggtcaggagattgagaccatcctggccaacatggtgaaaccccgtctctactaaaaatacaaaaaattagccaggtgtggtggcacatgcctgtaatctcagctactcaggaggctgaggcaggagaatcgcttgaacccaggagacggaggttgcagtgagccgagatcgtgccactgtactccagcctgggcaacaaggcgagactccatctcaataataataataataataataataataataataataataataataacaatgataataaagtaactagggtatgttcaggttgattagctcagggaaaaggaaacttgagaattaggttcatatgccactttagaagtctgagcagctatcccaagacctttcagtattcattaattcaataattctttattgagcacccactaagtgttaggcattattccaggacttaagggatataaccagcgcagcattatggcttctgtgggccctatacaattttaccttcttgatccccttcttccatagaaaaatattaacgctgggtgcggtggctcacgcctgtaatcccagcactttaggaggccaaggcgggcagatcacgaggtcaggagttcgagaccagtctggccaacatggtgaaaccccgtctctactaaaaatacaaaaattgggaggcatggtggcgggcacctgcaatcccagctacttgggttgctgatgcagaagaatcgcttgaatctgggaggcggagatttcagtgagctgagatcgcaccactgtactccagcctggacaagagcgagactctgtctcgggggaaaaaaaaaagaaaaatattaacaattgtggtttatgatagtattgatatgaagacaagtatactacagatggggtgatatttattttttgttctaatttaaaaggaattagaatattttcatgagcccctaaaagtatcatgggttccaagcactgtgctttctgcattttatggataaatcagcctgggatatagcaataaataagacaaaaattcttgccctgtggcgtgtgcctgtaatcccagctacttgggaggctgaggtaggagaatcactctagcccaggaggtggaggttgcggtgagccaagagcctgccactgcactccagcctgggcaacagagcaaaactctgcctcagaaaccaaccaaccaaccaaccaattcttgccctcatggagttcatatttataattaataaattaatgaaagaaataagatttcacagcctgtacaatatagagagaccgcgtctccaaaaaaaaatttattttaaagtttattttattttatttattatttatttatttattttttgagacggagcttttgctcttgttgcccaggctggagtgcaatggcacgatctcggttgctcactgcaacctccacctcctgggttcaagtgattctcctgcctcagcctcccaagtagctgagattacaggcacctgccaccacacctggctaatttttgtatttttagtagagacaagatttcaccatgttgatcaggctggtcttgaactcctgacctcaggtgatccacctgccttggcctcccaaagtgctgggattacaggcgtgagccaccacgcccagcttaaaagttttttgtagatgcagggtctcactatgttgcccaggctggactcaaactcctgggctcaagggaccatcctgccttggcctctgaagtgctgggattacaggtgtgagccactgcacccagccttgtctctacaaaaaaattttaaaaatagcctggcatggtggtgcatgcctaaagtcccagctactcgggagactgaagcagaaggattgctggagcccaggagtttgaggttacagtgagctatgattgtgctattacatatgagcttgggtgacagagcaactcgttgtctctttaaaaacaaacaagcaggccaggcgcggtggctcacgcctgtaatcctagcactttgggaggccaaggcggacagatcatgaggtcaggagattgagaccatcctggctaacacgatgaaaccccgtctccactaaaaatacaaaaaattagccaggcgtggtgtcaggcacctgtagtcccagctacttgggagactgaggcaggagaacgtgagggtgaggctgaggaggcgtaatcccgggaggcggagtttgcagaagctgagatcgcgccactgcactccagcctgggtgacagagcaagactctgtctcaaaacaaacaaacaaaacaaaacaacaacaacaacaaccagggcaacagaacattccaaacagagaaggcagaaataaaattggcagttgagagaaacagaaagaaaacctatgtgactggagctgacctgttccctgaaaacccagagggcacagctgggattagtggatgcaaatatacagactgtgagggaagaaattggctaaaacccgaaccatccagcaaagaaaagaggcagctctgggaggtggtacatggcttctggagggccctgagagcggagcccaggttgtacttcttcaggactactgcccagacactggggatgccaagacattgggattcccatccactcagttgctccctttctaacctctgtgtttacccagaaggttcaccctgtgctttgtaaaacccagaataaacacccagggactatggtttatatgaaaccctctgagacggtcaaataacaccttgaactttataagtagacctggacactttttcttccttgcttcctgagttgtttcttgtcgggtctgccaagggcccctctagaacacatgggaaataatgtgatatatatatatttatttatttatcagggctagacaggagtttaagctcagcctactcaatttatctcgaaggatagaaccccaacacccccttggctcaaagttatcgtttctaccaggaggtaacttggggactcatcagtgattttttttctttttttgagacagagttttgttctgttgcccaggttggagtgcagtggtgcgatcttggctcactgcaacctgtgcctcctaggctcaagcaattctcctgcctcagcctcccgagtagctgggattacaggcacgtgccaccacacctggctgatttttgtatttttagtaggaacagggtttcgccatgttggccaggctggccttgaactcctgggcccaagtcatctgcccacttcagcttcccaaagtgctgggattacaggtgtgagccaccatgcccagccaactttttattttttcataaaggcgaggtctcacttttttgctcaggctggtcttgaactcctgggctcaagtgatcctcccaccctgacctcccaaagtgctgggattacagatgtgagccaccacactcagtcaaaagcaaagcatggcctcttcatgtattggtgacaccacacttgccacttagcatttagatcaatttccttttacaagcttcttatttttactttttttttttttttgagacagtctggctctgtcacccacaatctcagctcactgcagcttccgcctctcaggttcaagcaattctcgtgcctcagcctcctgagtagctgggattataggcatcatgtccagctaatttttgtatttttagtagagatgggtttttgccatgttggccaggctggtcttgaactcctgacctcaagtgatcagcccacctcagcctcccaaagtgctgggatgacaggtgtgagccaccatgcccggcctccttttacaagtttccataacaccaagcaacacttttttctttatcacggctagcttcatagacatatgacctgggcagtcacatagggccctgtgcttaggatggtccaatgcttggtttgatgctctgctctcagcatcttttttttgttttgttttgttttgtttttgagacggagtttgttttgttttgttttgttttgtttttctcctgcctcagcctccccagtagctgggattacaggcgcctaccaccacgcctggctaatttttgtatttttattatttatttatttatttattttgagacggagtcttactttgtctcccaggctggagtgcagtgatgcaatcttggctcactgcaacttccacctcccgggttcaagggattctcctgcctcagcctcccaaagtgctgggatgacaggcatcagccactgcacccaccccacattaggaccttaaacttgatccttaacaatgggatgtcatggagaggtttgaagcaagagagtgacgtggtcagatttgtgtttcagaaaggtcaccctgactctagcagacagtagggatggaagaggccaaatggcagggttgagtgaactatcaggatgttaacacatggactagggcagggctgtggggttgaagagaaggtcatggaagaggagtgggtaagatttggtgactgactgattaagggctaagggaaagtaacaagtacgggtgatgcctgggattctgtcctcggtgtccagggtggggtgcgggcagccctaaaatgagtaacacagacaggaggtttgcgggttggatgtggaattcgttttggatgtcctaaccaaaaccagctcctgtccccaaacaggaatcagaggaaccaaaacaagctcctgtccccaaacaagaagcagaggaaaaaccacactagcaagctgcaagagttggcactgctgctgcccatagccctgaagacggggaccaagaagctcacaaaggtacagggactagaggagaggggccagatttgggacgcaggtctttaaatagcagcaaatgggtcaccctctcctgggaaacctggacagatcctttcagtggcagcattcaaatgggaatggtgctactctgaacgggaatttccgggagtctgtgatcccataactaggtgcctggaggatccttttttgcaaaggagagaggagaaaccgggctggggaaatagagatagcacaaagatcattgttccaggaatcaaatagccatgggtttgagccctctagcttcacagctacagaactctgggcagtttctcaggctacccagactttctttttttctttgttcttttttgtttttgagagtcctgagtagctgggactacaggcacaggccaccacacccggctaatagtttttttgtatttttagtagagacagggtttcaccatattggtcaggccggtctcaaattcctgacctcaggcgatccatccgccttggcctccgaaagtgctgggattacaggcgttagccactgtggccagccaaatttattctcttatggttctggagttcagaagtccaatatcagtctcagtggctttttcacttgtttggttgttttggggtttttaggttttgttttgttttgttttgtttttgagacaggatctcactgtctcacccaggctacagtgtagtggctcgacctcagctcactgcagcctctgcttcccaggctcaagcaatcctcccacctcagcctcccgagtagctgagactacaggctcatgccacacctggctaattttttgtagttttggtagagacgaggttttaccatgttgcccaggctagtctcaaactcctgacctcaagtgatcctcccaccttggcctcccaaagttcggggattacaggcataagccactgcacccagccagtctcactggtttaaagtcaagttgtcagcagggttggttcctcttagaagctctagagagtttgtttcctttctttttgccaacttctgggggctgcctgcattccttgacccatcatggtccctcaaagccagcatggaagcatcttcaaatgtctttcctgtcctaccgcttctgttgtcacattgccttccctgcctttgacattcctacctctgtaagattatatgtgattacactgggcccacccagataaacaggaataatcaggccatctcaagatccttaacacagcgggctcagtagtttgggaggccgaggtgggtggatcacctgaggtcaggagtttgagaccagcctggccaacatggtgaaaccccgtctctactaaaaatacaaccaattagccaggagtggtggcgcgtgcctataatcccagctactcaggaggctgaggcgggagatttgcttgaacctgggaggcagaggttgcagtgatccgagatcgcgccattgcaccccagcctaggcaacagagcaagactctgtctcaaaagaaaaaaaaaaaaaaagatccttaactcaatcatatctgcaaagtcctttctttctgccatacaaggcaacatattcataggttctggggactaggacatggacatctttggaactttggggggatgcattatacagtccacgatggtgctaaaaatatttgaggaatgtgagtttttggcatgcataggtgctggaatagcccttggggagccagagatgactatgacacagtccctcccctcgaggaatggcagtcttgtcaggggactggcaacgtttcataaatgaccggatggccacatctcttggaattctccccaggcctcagcctacttatttaccatgtgtcctctgctgtcttcagaacccctcttctcccacctcttcatccttccctcagctgcatcatggggtcctgctccacagacaacccgcatcccggggccgtgggacatgctcagtccagtgctccgcgccatagcaggagctgtgagaattgcctctcctgtgttagagacttggggtgcagctttgattcagagtgtccttcctcaccactctggctggtgaattgccccctgccccgtctgatcatgtaggttctccctctgaccatgaacacccccagcgtatcactgcaattacttccttgtttccgacctccttcaggtggagttctgccagagccataaaggagacatctctgtccgccttgcccacagggcctagcaagagcagagagcagacagcagacagcagtaacaaccgttcccaacttactgagcgttccaggtgtcagaccttgagtgctaagtgtcttagatacatttttctcatttaactctcccacaaggcttgtgagagatgtatggctatgctcattctttggtctgaggaaactgaagtgcagagaatggtcacatcgcccacaggcacagagttgagatagaaagagagacagagagaaagagagagggagggattcagatgtggccaggcacagtggctcacacctgtaataccagcactttgggaggctgaagcaggcagattgcttgagattaggagttcgagaccagcctgggcaatgtgacgaaagtccatctctacaaaaaatacaaaaattagccagccatggtccccgctacccaggaggctgaagcaggaggatagcttgagcctgggaagtggaggttgcaatgagtcgagatcataccactgcactccagcctgagcaacagagtaagaccctgtcttttttttttttttgagacggagtcccgctctgtaccccaggctggagtgcagtggcaccatctcggctcactgcaagctctgcctcctgggttcacgccattctcctgcctcagcctcctgagtggctgggactacaggtgcccgccaccacgcccggccaattagtttttgtatttttagtaaagacagggtttcaccgtgttagccaggatgacctcgatctcctgacttcgtgatccacccgcctcgggctctgaaagtgctgggattacaggcgtgagccaccgcgcctggccatgagaccccatcttaaaagaaatagagtcagatgtatctcactccaaaggctcttgccttcaaccattctgtcactcaaggttcaatagatgtttgttgaatgactgaatgagctccctttgttgggacagttacaggacctgttgatcttaccttcagaaggtctttgagagtccagactctggtgtagcccccaagctaaccttcctgaagtttcaattactgaggcatctgtcttgaaatctgggatgatgcccaattgctttctacatacaacctttatactagtaataataagtaacatttatatattacttcatggtttataaggactttttcttagcgagtgccaaccatatgctccaagcctggtattagagataataagcttaaaaagactgaggctggctgggtgcagtggctcacacatgtaatcccagcactttgggaggccgaggtgggtggatcacttgaggtcggtagttcgagaccaacctggccaacatggtgaaaccttgtctctactaaaaatacaaaaattagccaagcgtggtggcacattcctgtagcccctgctactcaggaggttgaggtgggagaatcgcttgaacctgggagtcagaggctgcagtgagctgagatcgtaccactgcacttcagactgggcaacagaccgagactccctctcaaaaaaaaaaaaaagactgaggccaggtgtggtggctcatgcctgtaatcccagcactttgggaggccaaggcgggtggatcacttgagcccaggagtttgagaccagcctgaacaacatggcgaaacctcatctcgataaaaaatacaaaaaattagctgggcatggtggcatgcgcctgtagtcccagctacttgtggggctgagacaggaggattgctcgagcctaggaggtggaggttgaagtgagctgagatggtaccactaaactccagcctggccaacagagcaagagaccctgtctcaaaaaaaaaaaaaaaaaaaaggccgagcgcagtggctcacgcctgtaatcccagcattttgggaggctgaggtgggcggatcatgaagtcaggagattgagaccattctggctaacatggtgaaaccccgtctctactaaaaaatacaaaaaaattagcgaggcgtggtggagggcgcctgtagtcccagctactcgctgaggcaggagaatggcatgaacccgggaggcggagcttgcagtgagccaagattgcgccactgcactccatcctgggcgacagaacaagattctgtctcaaaaaaaaaaaaaaaaaaaagcgcaaaaaaaaaaaacaaaaaaagactattggccgggcgtggtggctcacacctggaatcccagaactttgggagaccaaggcgggcagatcacaaggtcaggagttcgtgaccagcctagccagcatggtgaaaccccgtctctactaaaaatacaaaacattagctgggcctggtggcacgcacctctagtcccagctactcaggaggctgaggcaggagaattgcttgaacctggcaggcagaagttgcagtgagctgagatcgtgccattgcactccagcctgggcaacatagcaagactctgtctcaaaaaaaaaaaaaaagaaaaagaaaaagaaagaaagacagggttgagcacaacagccagggctcaagacaacgtggggctgctggggaccagagacacagaggctccaggaaggaccccattccccacccaccccaacaattcttcagtcggcagagaccttcttgttctgctatctagccctcactgcagaccagtgagacaggggctacagctacaggctggagtgcagtggcatgatctcagctcactgcaacctttgcttcaggctgtgtctctggtccccagcagccccacattgtcttgagccctggctgttgtgctcaaccctgtctttctttctttctttttctttttctttttttttttttttttgagacagagtctcgctatgttgcccaggctggagtgcaacggcgtgatcttggctcactgcaacctccgcctcacgggttcaagcaattctcctgcctcagcctctcaagtagctggcattacaggcatgtgccaccacacccagctaattttttgtatttttagtagagacggggtttcaccatgctggccaggctggtctcgaactcctgacctcatgatccgcccacctcggcttctcaaagtgctgtgattacaggcgtgagcctggccaaccctgtctttcttttgaggcagaaggagattctggtgcatgtcctgcagtacattcagtacctccagagaaacatcgatgccgccaaggccttgttcaaatgccacatcaccactggggaaggtggacttgcgggtaagtagttcagccagtgtttcctggtgcctgtgatgttccaagtgttgttccagccatcagggatactgagtgacccttctgtcaaggcctggtataggggacaaagagagatatgcaagatgcctcagagaagaggggccttggagctgggccttcaggactgtaggagatgcagggaagcccagccaggcagaagaaacaggccgggcacagtggctgatgcctgtactcccggcactttgggaggccgaggcgggcggatcgcttgaggtcaggagttcgagaccagcctggccaacatggcaaaaccccgtctctactaaaaatacaaaaattagctggtgtggtggctggcgcctgtaatcccagctacttgggaggttgaggcaggagaatcacttgaacctgggaggcggaggttgctgtgagccgagatcacgccactgcaccctagcctgggcaacagagcaagactgtgtctcaaataataataataataataataataataataataataatatatacataaaataaaataaatctgatcatgaccttcccctggcataaaatccctcagtaattttcatcttcttcacttccctccatagccaggtgctggaaaccatttgggatctcatccctgccttcctagtccctgccaaacctccccagcctcatctcctaccattctgccagcgtattttatttatttatttgtgctttttgttttgttttgttttttgttttttgtgtgttttttgagacggagtatcactctgtcacccaggctggagtgcagtggcgtgatctctgctcactgcgacctctgcctcccgggcctctgccagtatattttacactacagtaacagcgacagcacccagcacatctagccttaggggactgctatgttccaggtgctgtggtatgtttctttctttctttttttttttttgaggcagagtttagctcttgttgcgcaggctggagtgcagtggcgtgatcttggctcaccgcaacctctgccttccaagttcaagtgattctcctgcctcagcctcccgagtaggtaggattacaggcactcaccaccacacccagctaatttttttgtatttttagtagagacggtgtttcaccatattggccaggctggtctcaaactcctgacctcaggtgatccacccaccttggcctcccaaagtgctgggattacagctgtgagcccctgctcctagccgtttttttttttttttttttttgagacaaggtctcactctgtcacccaggctggaatgcagtggcatgatcatggctcactgtaacctcaaaatcccaggactcaaaactccaggggtcaagcaatcctcctgccgcagacttctaagcagcttgtactacaggcacgtgccaccaatatccagataattttcttttttttgagatggagtttctctctgtcgcccagactagagtgcagtggcgtgatctcagctcactgcaagctctgcctcccaggttcaagccattctcctgcctcagcctcccaagtagctgggactacaggcgcccgccaccacacccagctaatttttatatttttagtagagacaggattttgccgtggtcgccaagctggtatcacctcaagtgatccacccatctcagcctcctaaagtgctgggatgacagatgtgagccatcgtgcctggctctggctaatatttttgtttgtttttttgtagagacagagtctcactgtgttgcccaagctggtcttaaacccctgggcttaagcaattctcccgccttggcctcccaaagtgctgggattataggagtgggccaccaagcctgacttgtttctatgtattaactcacatttaatcgtcaggacaaataccgaagggaaaagctaatgtggtcctgttttgcaggtgatggaactgaagcccagagaggttaaggtcacagagatgagcctgagtcagggcctggctcagagcccacacacatcatctccatgccacgcagacctccaatcacacccaatgacttgcctgtccccagacaccccgcgcgtgtcttctcatgcctgcaagctcttactcagatagtttcttcttctttttttttttttttttttctgaggcggagtctcgctcttttcgcccaggctggagtgaagtggcgaaatttcggatcactgcaagctccaccccctgggttcaagcgattctcctgcctcagcctcccaagtaactgggattacaggcacccgccaccacacccagctaatttttgtccctgacatgtagtgttgaggactggtcatgaagtgagagactggagtcagggagatgaggaaagacactgttcggagtgatctagacgggacaattaggcccaagctagcgctgtagatgagaatgtggatagaagtgagtaaacctagaagatgttaatgaggaagaatcgagaggccagagggaaaggccccagtgaccttgagggggtcggctaggagaccctcactgtgttgaggaaggcgggaggaggtactggtgtgggcggggagagggtgaagcatcctcaaggtgcccagtctggggaagtgttgattccattctcccactgagccaaggcccaaaacagccctgaagaaacctgagttcttgccctctactttcacagtcctgactgagcggccttggataagccctcagtttccacactgtaaagtcagcctgggggcccaccctgacccgggactgaggagcattgtctggaaggcaggaactgcagttggatgcagatggggtgggggatctgagctgtttccctctccatccctgcagggctgggtcagaaaccagcctggggcccagccaggcggaggagacactctaccccctccagctccccaagctctcagaagtcctgtctccagggggcgtgccagaagcctcggaagaagaagctgacccaggcatcaggtacaagctgtcactggaggcagaactagaagcccaggtcacccaggagcagggctccttctccagggatgtccttactctgggggccttctcagcaccctgtgccggggttcaactcccagctcctccttgtattagcactgaggcctcacacccggaaacttggggttcactggtctatggcagaacctgggcatcagtattttttttttgagagagactctcactctgtccaccaggctggagtacagtgacacagctcactgccacctctgcctcccaggttgaaacgattctcctgcctcagcctcatgagtagctgggattacaggcatgtgccaccatgctcagctaatttttgtatttttagtagagacagggtttcgccatgttggccaggctggtcttgaactcctgacctcaagtaatctgcctgcctcggcctcccaaagcgctgggattacaagcatgagccactgcgcctggccagtgttttttaaaggtcgcaagatgattctgacaggtggacaggggttgaacaaagaggcctgtgattgaggatctgggcattcccataccaggccaggcatagctttgacactgacaaggatgtttcccacctgaaccctattctggtgacaggcaggtgactcccaggcccctctgacacctgaacctctgctcccccagaaagccagactcggaccccgaagcctcgccgctctctggccctgaacaagcctgagaagctggtggccccatccccagaccagaaaggaagtggcacaggggggaccactacccctccaaggtgccctgactcctgcggtcacccgaggcctgcatcatcctcacctccaggtgacagaaaaggaggacagtcccagctgacgctgttggatctggccgaggacaccatccactgtgacatctcaagtgggtctctttcctcactctgaacttagtctttcagtaagatgccactctgggggcacctgctgtgtcccagacacagtacccgtagtgggggctgcagcagtgaataggaaacaccgcctcttacttctcaagcttgtggccttgctctggtggtcttcatctcaggctgtgtcgtggctgtaatggggggatgagatcagcgtcattgtcttgtgtgggcttcccatcacagaaccagggaggagggcagggcctccgcctcaggcctcacttggctctcccatgccccagtcactgcactggtttggaaaacgtgtggtgatgctttcaagcagagagctaggccagagggagggaggtcggagctcgaggctttgaggcctcaagtcatctcgttcctctatttgttcattcagccttttctttttttttttttttttgagatggagtcttgctctgtcgcccaggctggagtgcagtggtacaatctcggctcactgcaacctctgcctcctggattcaagcgactctcctgcctcagtctcacgagtagctgggattacaggcgcgcaccaccacgcccagctaatttttgtatttttagtacaaacagggttttgccatattgaccaggctggtcttgaactcctgatctcaggtgatcgcccaccttggcctcccaaagtgctgggattacaggtgtgaggcactgtgccgggcccattagagttttttgtttgttttgagacaaagtcttgctctgtcgcccatgctggagtgcagtggtgcactctcggctactgcaacctctacctcccaggttcaaacaattctctgcctcagcctcctgagtagctgggacaggcgcccgcacccatgcccggctaatttttgtatttttagtagagacggggtttcaccgtgttggccaggctggtcttgaactcctgacctcgtgatccaccgcctcagcctcccaaagtgcaggggttacaggtatgagccacggtgcccagcccccattacagcttctgatagggatgtgggattcaaaaaacccaggggtgatttggggcacccctcagcctcacaccaacgtgacaccctgcatcctgaggtttgggctaggattggggagtgagagggtgtgtggcagaagctggcacccctttgtcccctgcttctgggcttcctggaatttggtccagtccccaggcatggtcatcctgatctgccccttaggctgctggtgccagggcagtgtccaggatgacgcacctttccctgcgctcctggctcaggaagatgtggcgaggatccattttctcaacaagacccagccccatcccaggtaagggcgtccccagggcactgagtgagtggtgctgaggggtttggtctggcgtgggtgaggggtagtgggaagacaggccaagtcacgtcctctgcgggtgccccttgagcaccaatggaggcccagctttgtgtctgccattgtgagctcgcaggaaagcctgacttcccatttcccagacatggtcacagcttcctcaccagtctctttgcctcacctgttgcccctccatcccatcctcatgtgaccacatggcttttccaacacagagacgttgaccacggagtttgtggcttaaagcccttcctcaggcctgcagcatagagtccaatatttttgtttgtttgtttgtttgagacagggtctcactctgtcgcccaggccagagagcagtggcacaatcataggtcactgccgcctcaaccttcagggctcaagcagtcctcctgcctcagcttcctgagtagctgggaccacaggtgcacaccaccacacccagctaatttttttatgtttattttttgtagaaatgaggtccccctatgttgcctaggctggtcttgaactcgtaggctcaagcaatcctcccacctcagcctcccagagtgctgggattataggtatgggccactgcacccggcccggatatttcacctggcctttgagaccttcagtggcccccaactcacctcgtcagccctctctcctgcccttcacccatgactcttatacttcacactgccacacatttgccattccccagaagccctgcgccagcccctctgagcttctcacattccagtacttcttcctggatagcctgcttccctgtgcccctggaaaactgcccatccctcaggctgagcccactgctctccactggctcatcatcctccagcgccctcggtcacagcactgcttacgggctgggctatcctcatgagactgtaagctccctgaggatgggagcctcgactgactgagctttacacccccagcactcccccaggggccagtgcagagtgccaaaggggccccatagcagtttctagcccagagtctgtgagtctgactctgaaactccacctcttgcaggcagaagctggtgttctatgattccagcgaggatgtggacaaagggtccctagacgctgacccttggctccctgcctggaccccagagaacagcccccaaggtgactgcaactctgtctctcctccttgtaggctggtgtgggccttcccatactttcagtctgaggatgtctatggaagagaggaggcgggaaagggaatggagatcccctaagcacagggaaggcaaacacacagtgcacctgccagctctccgccaccgctgccacggaggcttgacaatcaatcaccactctttccttgagcccagacatggcctcagaatcattctgggtctttttggtttgtttgttttcttttttgagatagggtttcactctgtcgtccaagctggagtacagtggcgcagtctcagctcacttcaacctctgtctgctgggttcaagtgattctcctgcctcagcctcccgagtagctgggattacaggtgcccaccaccatgcccagctaatttctgtatttttagtagagatggggtttcaccatgttggccaggctggtctcaaactcctgacctacggtgatctgcccgcctcagcctcccaaagtgttgggattacaggcatgaaccacccctccgaactctttttgtgtttttgttttgttttttcttttgagacaagttctcgccctgaggctggagtgcagtggcgcaatcacagctcactgaggcctccaattcctggactcaagggatcgtcctgcctcagcttctcaaagtgctgggattacaggcacgtgcccctgctcccgacctcagaatccattttttttttttgagacggagtttcactcttgtctcccaggctagagtgcagtggcactatctcagttcactgcaacttctgcctcccaggatcaggtgattctgtgtcagcctctgagtagctgggattacaggtgtgcaccaccacgcctagcaaatttttatatttttagtagagacagggtttcaccgtgttggccaggctggtctcgaactcctgacctcaggtgatccacctgcctcggcctcccaaagcgctgggattataggcgtgagcccccgcatctgacctcagaatctttcttgttgcagagctgcaggtagttataatcagcctatgggactttgcacattatgatattgatttttctttttttttggccatccctgacataatgccaaacatcattttgcttcatttcttcttcttttttttttaaattttgagacagggtctcactctgtcacccaggctggagtgcagtggcacgatctcggctcactgcaacctctgctcctgggttcaagcgattctccttcctcagcctcctgagtaactgagattacaggcacgtgccactacccccagctaagttttgtattttttagtagagacggggtttcaccatgttagccaggctggtcttgaactcctgatctcaaatgatccgcccaccttggcctcccaaagtgctgggttacaggcgtgagccatcgcagccggctgcctcttcatttctgtgatcaagaattcaaaatgagaaactgagattcgctttccgtagcatcaggcactatctcctcaatgccagctgctgtgctagggcagagggtgatctctggccacacccctgagtctgctgttccctttccagggagcccactgttcctggggcctccccagattgatgtctggagtggaacaggccacccaagtgagatcctcgggctcagccctagccttttcagctccccagggaaactgctgccagacgagatcttggaggatgacatggagtacctgacccaaggtgaggcccaggcctggccctgatgcttagttcattcgggaaacatacggtgcccaggcctgcgctgggccatcctgggtgcccggggtgaatcctgccctggccctgcctcaaggagcccacggcctagtgggggagcagccacaggctggtgtggtgcatgggtggctttagaagcccatagcaggacttgagctcactctgtgtgttggaggtgacccaggggagtgggctgtgagcgggatttggacctagggtgggagatcctgaaggagaacgccagagacggggactccggctagcagggacggtgtggctgaagctgggcggtgtgggagaagcatttccactctggctgcccctctggtctccctccctagcggctttctttgaagaagtgtgcttagatctggagtcttcaccttcagcctacacgcaggaggctccacaggaaaaggtagacatcctctgcccctctgtccacagacacatccatccgtctttccacacacgtcactcatggcttcattcactcatccactccctcaccctttcagccaccatctacccatctgtccttccactcatgcgtctcctcatccttaaaaccgccccccgaccctctctgcgctcactggtggccaccagatgccggctctgtgctgggcacgtggaacgaattggacaaaatggataaaaaaggataaaagctgccaggtgcccatagaaaagaaaactcacatcattttattcatttattttattttattttattttattttatttagactgagtttccctgttgtcgcccaggctggggtgcagtggtgcgatctcggctcactgtaacctccgcctcccgggttcaaacaattctcctgcctcagcccccctagtagctgggattacaggtgcctgtcaccacacccggctaattgtgtatttttagtagagatgggggttcaccatgttggccaggctggtctccaactcctgacctcgagtgatccgcccaccttggcctcctagagtgctgggattacaggtgtgagccaccgtgcccagcttcccacatcattttacaactactctacgaagcagggtctcctgtggccccattttacagataaggaaattgaaatcaaaagactaagctgggcgcggtggctcacacctgtaatctcagcagtttgagaggctgacgtaggcggatcacctgagatcaggagttcaagaccagcctggccaacatggggaaaccccatttctactaaaaatacaagaagtgtccgggcgtggtggctcacgcctgtaatcccactattttgggaggccgaggagggcagatcacctgaggtcaggagttggagaccaaccagtctggccatcatggcgaaatactatctctactaaaaatacaaaattagccgggtgtggtggtacgtgcctgtaatcccagctactcaggaggctgaggcagaagaatcgcttaaacctgggaggcgggggttgcagtaagccaagatggcaccgttggactgcagcctgggcaacaagagcgaaacccagtctcaaaaaaggaaaagaaaaagaaaaagaaattatcagggtgtggccgggcgtggtggctcatgcctatacttctagcactttgggaggctgaggcgggcagatcacctgaggtcaggagtttaaacctagcttgaccaatatgatgaaaccccctctctactaaaaatacaaaattagctgggcgtggtggtgggcacttgtaaccccagttactcaggagtctgaggcaggagaatcacttgaacccaagaggtggagaatggagctgagatggtgccattgcactccagcctgagggacaagagtaagactccgtctcaaaaaaaaaaaaaagaaagaaaagaaaaaaaagaaaagaaaggaagaaagaaagaaagacagggtcttgctttgttgcccaggctggagtgcagtgtcaccatcatagatcagtgccttgaactcctgggctcaaatgaccctcccacaccaccatgcccagctggttttttaaattatttttaaatttaacttaattcaatttctttttttttttttgagacagagtctcactctgtcacccaggctggagtgcagtggtacgatctcggctcactgcaacctccgcctcctggatttaagcgattcttgtgcctcagcctccagagtagctgggactacaggcgcccaccaacatacctggctaattttttagtatttttagacagagtttcgccatgttggccaggctggttttgaactcctgacctcaggtgatcctcctgcctcagcctccgaaagtgctgagattacaggcatgagccactgcgcctggcctattttttttttttttttttttttttttttgtagaacaaggtctctctatgttgcccaggctggtctgtaactcctggcctcaagcagtcctcctgcctcagcctcccagagtgttggggttacaggcgtaagccaccacaccctgccaatctgagctgctgctaatgctcatgttatgtcctagaaaagcagtactggggggatgaaggggcaccacttgtctcccctcccatctttctccctcatcatgccccaggacacagcctccaaggcccccaaagaccctcctgagtcccacagcctgcaccggtcctcagtctcgctggaccactgctacctctcgctgagcgggaacagcaaggcgccatccagctccagctccagctccagctccagctccagctcggaggacagcgactcggagcccctgtggaagcagcgagaggtgagagacacggccgcatgccagggccagcagggcctccttcctctctcaccaccctctccctcccccaggatatgcaggccaaccctgtgggcacgccgggctccagcgaagaggacgaagacaccacatggacccccacccggctggcctcacccctgctggcagctgagaaaaaggccacgaagggccaagtagccagggcccctgtgaagcccaaggagaagaagaaaggcccctgcccaccccagatgaagaagaagtgtgtcaacggcttcatcatgttctgcaggatgaaccggaagcagtacatccggtgggtagggggtcgtctttggccctggggaaggccctggcttcgttctctgcccgcagcctggccatgccgctcctcacaactgtctgacactttttccccctccgagaccccacaaacccttcgtggaccacagttcttccccagaactgaacccggccccattgtattggacagggtccatccattgtcagcgctgaaacccaattcaggctttagacttcagaaaaaaaggagttttttttgttttgttttgttttttgagacagagtctcactctattgcccaggctgtagtgcagtggcacaatcacagctcactgcaatgtctgcctcccgggctcaaatcactgcaacctctgcctctcagattctcctgcctcagcctcctgagtagctgggataacaggcgcgccatcagctaatttttgtatttttagtagagacagggtttcaccatgttggccaggctggtctcgaatgcctcacctcaagtgatctgcctgcctcggcctctcaaattgctgggattacaggtgtgagccatcaggcccagcaagaaaagaaaatgaattggcttatataacctagaaaacaagggcgggtatagactgccttgagacatagctggttttagggctcacacaggctgtctggaatctttgtccttttcacccagttcctctgtcttccgggctggcttcattctctggcaggtggggtcaccccaggaggcacaggctcgggtcctgtcccccacccaagcgaccccgggaggaggagaggtctctaaggttttaagcaaagtccttgggactgactttggtagatccggtgccaaccctgaaccagtcactgccaggcctggagccaggggatggggaggccccccccaagccacagtggaaaacagctagttcctttacaggaagatccagatgtgggggccaggagcggtgcccacaggtcccctgcactctcctgggacaccaggtgcccccttgtgaacagccgctgagtccagctccctctgcctcctcagctccagagggtggtcttggaggccttgtagacccacaaggctaggaagggtctgagttctcagtcagggtgtcctgcagacctctccttacctcctcctccttcctgtcccagatcctgccctggaaccgcttccacagctgccaccaaggagctggcccagctgtggcgggtgatgacccagcaggagcggaggccatactggtgagaggctccggccccgaggtgtgggtggggggtggaagagcctccctaccccggaaccctgctctgtctctggagccttgggtgtcatggcatgggagactgggccgaggaatttgcgtgttgccccttcttatgaaacccttgggggtgacacaggtgtaggggtaccccaccacagctaagctggggaacagctgagcccagacatggacccctgcctcaattcttttgctgtctctgccacacgactttctcggggcgtggtctgattttcctgtcgcttggccacctcgactcccccgaatcctgtcccctccaccttcaaggagctgccacctgccctggctcctgactttgaacacatcccagagcccttggccgagtcccatcttactgactgggacttggtggacccaaggctcgcccaatagaggctaaaacggtggcccaggcccctgcggggacacaggattgggagtggtacagggatgcccgggaggcgagtgaggaagccaggccatcctgccaccgtctccccagcaccaaggctcgcaggttcagccgccagcacaaccgcatcgtgaagcaggacggctccagcagcgaggctgaggactgggagacgccaaagcccttctaccagctgctggccgagaaggccttgccgctgcccccgcacctccagtgagagggcggcccctcgcctcgctcccctcacccctcatggcaaccgcggctcttgctggaagccaggacccatcgatgaacttgtccctcctgggcctccagcccctgagaatgcaggtcccatgggactggggaggggggcactgattagccccaaccgctgggcacatttgcctggagcaccagagtcacccacagctgccttgattctcccccaggcttaggaaggaaacccaaaatgaaatgcggggtgtcggaaggtgaagtttacccacccctctccccttcccttccccaccccagagccactcggttgcaaccctgttcatgctcacctcaccctactcctccctctcctgttctatttttagactatttattgttttaaataaaataaagcaagtggaacctttgttaccagcaagagagacaagggcaggccctcctgcgtccccctgctgccccactggggtgctccgtccaccctcatctggaggcctgtggcttgcaagaggcctcagtgccaccccctccccagccactctgtgcatctgaatgcaaacccctcttcccctcgggaggcagcaatgggaaggccaggtctcgaggtgggctctgtgttcagcgctgctttggacagacactggaaggcaccccagacccctggtggtggtgtaatccgataactttattttaattgaaaatggaggcataacatgtcctagaaaaataaagatttaggatacaaaggagacacagcggcagggctgcccccagggatgagggaatctttggtctgggccggataatgaggacaagggcttgagtcgaggggagctggtgaaggaagacccccgtctccccacagctgccccaccccccgcccctggcaggaaatgccacactggggagggtctccagtctcaggggcgcggggctgcctgtcctccaccttcggattccaggcagttgtgacaacaccagctatcggcagagctattaatagtgtttcagggagtgacagggagagggctctgggggctggaagtccggccctggggcagggtgttccgcttacagctagtaccaagtggagggggcagggcccctgagtcaggaccctgagtcccccacgtatatggcagggcacagcatggggagggctgtaacagagaggcctcccatccaaagggggatggagacctggacaggaggtggccggggatacaacccccagcaccaccagggcttggagaggccacccaggcagaaggatgtggtgactggggtcttcagcaaccgcatttctggggctcccccctcccattcctgtccctgcgtcttcagcaccaatgtcgggagaggccacggggccacactgggtcacagttccaagggctcctccacaggcaccgactggagctgggtcagaaccttggcctcagcttccaacccctcgtcaacctcaccccctgcggtggcccccaggagcagcccctcagggtcggggtctggcagcctcagcacggtgtggggggcctgtgtccccagccccttttccgcttccagcagcccctctgttcctgcgcttagttccagccctgctgaccagacaggcacggccgcgggtgacaacatcagcccctctggtgggggcgccgggaagttgggcaggaggccaggggagtcaggggagaagggcaggctggtgctggaggtggtggcagcggcggggggtggctgctgtgcagaaagggtgcctagggcgtgagcctctgggagagcagggctgggggccaccgggaggcctccctcaggcacggagatggccgtctctggcttcagtggcagggccaggccgggggctggcggcaggacctgggagacgagcatgctggtggggaaggtggcggtgaggatgatcttgccctgctgcagggccacacccgtcacgatggggctgccagacacagggttggccaggaggaagtttcctgtggggagagagggaccgagcgcaggtgagagccaggagagcaggccaagccagagagaagtggagactgtgcagctggagggcgggcggagggagccttgtggtgggccttggggcactgggacttgccagggatgagatgccctccaggagcccagggacagcccctccctctccgagatgactgcacccctccccggctctcacctaggcctgagggagggagatgggggtacctggggcagtggccgaaggcagctgcagggcagtcacgcccaccccggagttgatgaggtgcacattggcagggcctgctgcagctgccaccttcacagggctgcctggcccggctgccaacagctgcaggggccccacagcctggggcagggtcaccacctgtgaggtgggtactacctggggcaggttcaatagtggggaggtggggctcaggcccgtgggataccccgggggtggggagagcggtaccacttgtggggcagccacagcaggcactggccccgggggcagaggaaaggtggcagccgtcggggggccaggcaccacttgggccaggggccccaggacctcctctccaagggctggtcccggagcagccacctgggcccctttggtctcaggggcctccgactgagcctcctccagccgcacctcccctgtctgagggtccaggaccagagaggtcttggtctcgctggccccctgagggctgggctgcggtggaggggcacccccgcccccagtgagcagcagcgggcccaggctggaggcctcgcccagggccaggccgttgatgatgacggggcccccgttgaggagcactgctggggagccgctggctgccaggaagctcccgttcaccaggatggaggaggaagccgggcaaggcgcgggagggccggtccctgccaggaatatggagccctgggcagcggcctcggcggacactggggccgcccctctctccaggtcctcaggacttcggctggactcgtcctcagtcgtgggattcccatcagactcgctggccggagaaatggctgtcagctggggtcccttagcctgtggggcctcccgcatagccagccagctgctcccccacctttccctggcccaagtttcggtggatcattccaggggttatgacgcctctctgagaccactccaaactccagggccttttgcaagccctgcgtggacaccactgcagagaagcgctggggagggaagaggcccttgctctcccccacctcggcctcgggtccccagaggctgagctcccaggttgccctaaaagttccttggttgggcggaaagcgggcgagtggcctggagagagggagcagcagccgccagcccagttcccggtgccctccccgcggggcgtcagagaagggagaggccggcgctcagggtgggaggagaagggtttgggttacagggaaaccggagctgggaaaggttcacgtttcacaacaaaggcagaagacggaccacgccgtccgggcccggagggagtgtgggggcgggtgggtaagagtaacggtcagtgaagaaagggggctgggaggcagcccctacgcggagtggagtggccacaggccctgtcctttttcctcagtccctctagtgccccccgcagtgtgattccccaacaccgatgggatttgggaaggagctcggaatggagccgctggaagaggagacgcgtgcggggagagggcccgggcgggtgcctgtcccgtccacacttagtccccgcgccccgcgggcgcctgagattgtgagctggtcccgggagatgtccgaggacctcggcgcgccggccccagcagtgggcacgggggaagagggctggtggacgggatgtccccgggagagctggacttgcgccgcccgaggcccctcacctcttgcagggcgcgccgcctccggccccggtccggtcgcgctgtcgccggttcttgaaccagttgctgacctgcgtgagcgacaggccggtgagtgtggccaggcggcgcttctcgtccggcgtggggtagcggttgccgcggtagcaggccttgagcgctgcgcgggagcgctccttgaagcagtagactgtctcctcgccgtcccagatggtcttgggcagcgggaacttcttgcgcagtcgatacttgtccactgcgccaagcgcgcggccgcgggcccgctcggcctcatggtagcgcgcgcgcaggtagaggtcctgcaggaaggcgtggtgggcggcggggaaggggcggctctcgagtagccggtagagctcggcgtactcgccccgctggaaggccaccagggcccgcgcgcgcaacaccgggtcgctgccacgtaggcgctcggccgggggcagtgcgcccaggaagcggctcaagcggccggcgtggcccgcctggagcagcgcctcgcagacgcacgccacctgctcgggcgagaagcggaggcccgtgggcggttcggaagcggcctcggggggcgacccggggacgcccggggatcccgggccctcagctcccgcagccgctgcgcccgccccggccccggccgccgccgccgcctcaccctcggccgcctgcaaagtctgcaagagctggcgcgcttcctcctcctcctcttcggtcgccgccgccgccgccaccgcctcccccccagccgccggccccgcgctcggctccgcaggcaaggtagccatgttttgcaactttgggaagttcctccctccctctcttcctccctcgggctttccccagcctcctcccccacctgtccccccttttcgcccccactccccgctcttctcgatcttctttctggccgaccctgcgccccacgccgggaaggcgagatccagctctccactcgggtctctgtccccttgtgtgtgtccgtccccctcccgtctgtctgtgattctccctttgttttccctccgcctctggccgcgctttctgcctccccccagcgtgtgcttctggctcagggcctcagtttccccatcgggacaacgcagaaggtaacgggccgtccaggaggactaagggcgcgaagcctccgccccgagactgagcttctgcacgcctccgtctccagggtcctctgcaggcccccacattccccatctcggcctgcgctccgcccctcggaattcccggctccgcagggggggcgggtctggccgggaggaggggcggggaacgggctagaaagtttgcagcaacttttctcgagcttgcgtcccaggagcggatgcgcgtggcgtgcgcaggcgcagtggaaggaggatggccgcgcgcgctgccagcccagccccctcttctcgacgctcggtggcacagctgggccacagctgggcgggggcggtgcctccgggtggcccgctcgccctcctattggccggacgccaaagccccgccccgtggcttttcctcccccaaccctgattcggccgcttcgcatcccgctagctcctcccagaccttcggccgcctccacacgcctccggattggcccgctgcggagcctccggcccacaacgcaaaccgcggacactgtggagtccagagctttgggcagatggagggccttttattcgcgagggtcgggggtgggggtcctaggtggggacagacaataaataccgaggaatgtcggggtctcagtgcatccaaaacgtggattggggttgttgggggtcctgtagcctgtcagcgagtcggaggacgaggtcaataaatatccaaaccgccgaagcgggcggagccggctggggctccgagagcagcgcaagtgaggaggggggcgcgggatccccgaaaaagcgggtttggcaaaagcaaatttcccgagtaagcaggcagagatcgcgccagacgctccccagagcagggcgtcatgcacaagaaagctttgcactttgcgaaccaacgataggtgggggtgcgtggaggatggaacacggacggcccggcttgctgccttcccaggcctgcagtttgcccatccacgtcagggcctcagcctggccgaaagaaagaaatggtctgtgatccccccagcagcagcagcagcagcagcagcagcagcagcagcagcagcagcagcagcagcagcagcattcccggctacaaggacccttcgagccccgttcgccggccgcggacccggcccctccctccccggccgctagggggcgggcccggatcacaggactggagctgggcggagacccacgctcggagcggttgtgaactggcaggcggtgggcgcggcttctgtgccgtgccccgggcactcagtcttccaacggggccccggagtcgaagacagttctagggttcagggagcgcgggcggctcctgggcggcgccagactgcggtgagttggccggcgtgggccaccaacccaatgcagcccagggcggcggcacgagacagaacaacggcgaacaggagcagggaaagcgcctccgataggccaggcctagggacctgcggggagagggcgaggtcaacacccggcatgggcctctgattggctcctgggactcgccccgcctacgcccataggtgggcccgcactcttccctgcgccccgcccccgccccaacagcctacagctgttgttagtccactcgcacgcctcgaatcccgtccgaactcgtcattggctgcttcctagcggcctgtgttgattggctgcccgaagatccgccctcctgccgtgggcccagccccgcaaatgcgcagctaagcgggtggcaaggggcgggtggagcgcggggcgcgacggcggaggggggcgtgggcagccggacgtaccctggcagggagcagcaggtggcggcggtgcatggggcctggccccaccagcgggcactggcccacagccacggccggggggccatctagctggagagagaagggacaggtgacccgatcggagcccagcccagccctcagcggtggggcgagagacagcgaggggaatcgaggttggggaggttatctagggagatcccggagggaatctggtgaggcctgaacggagggagatctggggctgaataaagggcttctgccctctaaagtcgcaaagacgtagggtgagccctatatctggacggggagaccaggagccagggaggggatctgcagaatgggcagcaggtctgaggcaggggaaagagaggggtcttacatgggaaggtggatccgtggcccggggactggggacccccgtgacagctggaaggagaagaaagaggcatagggcgcgtggaggggcgaaggagggcggtggcgcggcgtgccccagcgtgggtcccttccctcctccaggtgtctatacacgccccgcggagcagacggcccacctcctcccggtcctccggggaaggggacacatgagggactcacctgtggctccctctgcctgcagcaactccatccgctcctgcaactgccggacgtgtgcctctaggtcccggttccgagcctctgcctcgcgtagttgactgtggggaggtaaggacggtgagtccgtccgggccggacgagaggggatgccaagggttgccaccggcccgcatcccggccccggccccggccccgatcccgacctggcgaagttctggttgtccgtgcggatggcctccatctcccggctcaggctctgccgggtgagcacctcctcctccagggcttcctggagctcccgcagcgtcacctcggcctcagcctctgccgcagggacagccgctggaactgccacttcagcctgtgtatggggaccaggcttaaggctgcctgtggctcctggaagactcaggacttgggcactggttccaggctaggaatccttgtttatcccctactcctccgtcccctcaacatttctggaatccccatagctcctgcaatgatccaagccccctcccttccctacctccctcagccccatccctgagtctggtcctctaaatctacacagggaccagagggctggtgctcaaacactaacacaacctatgtccctctgctgctcaaaatccctccagctccctaatgccctcacgacaaaaggccttgctgggttttgtttcctgctggcctctccagccttctcaggaatgattcagccaaactacctttcaggaacaaatcaggattcccacctgcccaaggcctttgccctggaggctctcgcctgaccacttggcacctttccttccatggcttgtttctccttcaccagcgctcagctcaaagatcgacttctcagatccccagcaacacacacacccttacttaatgccccactgtaactacagagaccgtcccatgtctgaagtaacctcgtctctccgtggtttctgtctgcttctgttcaggaagtccctagagggctctacagtgcacgccacccgggaagccctcaccttttctctcccaattgtccctgacggaccccctcccctccaccaacttactgtttcatcctgtggggacaccgagggctccaggctgggcgcttgcacgtgtggctcaagcagctgctcggcctccagttccatgggtgtggggcctgggacctcactgtccctggggagaggaggagggagtggggagggagacagaatgctgattctctggtggagaaccagaacttctggcctgtgggtaggggcagctgcttccaagacctcctgatttgaggaaggggagcagcagagcgaagagaacagagtcccaggtaggccaatagcccctcctctgcttaggaaaagccctgcccctctcctggccttgggcccctgggagctgctctttctaaaccttctgcagggacttggggtccagacccccatgttctagggtcagctcatctcctcccttgacatgtgaccgctgcagacccctcttctcagggcctcaggacagggaggccgacctgatggggagactgcttggctctggccacctccacagatgtggtcctaagactgggcatgggaccccaagatggcaacttgaggtcagcacaccccactcagctgtgggaaggggacagctcctccctggggtatgaagtggctgtcccctccaacccagcagtccctcctgtgggaacacggctcaggacctagctatcctggacatgcgcctgggttctaatagaggatgggttcaatcctgacccaccgttcaggccccgcagcggttcagaatcaagctggagttcattaatgataaggtatagtatgtgtaatgttgtccagtaataaaagctgactagaaaaccaactgttctcttagacaaagtagcatgaggaaggggaaaaaaacaaaccaaaaaaacacctgttctccactatttaaacatgtgtcagtacacgtgtgagccagggaccactgccatctggtgagctcacgagatatcaacttccttttccttatctgtattttctaatttacttgtgataagcaatgcattatttgtgtaattaatacttttgttgagaccaggtctcactttgttgcctaggctggaatctatcatggctcactgaagcctcaaactccaggctcaagtgattctcctacttcagactcctgagtagctaggactgcaggcacagaccaccatgcctggcacgattttttcaattttttgtagagacagggtctcattatgttgctcaggctggtcttgaactcctgggctgaagcaatccgtccacttcagcctcccaaagtgctgggattccaagcgtgagccaccatgcccagcctgtaaattagtacttttttttttttttttttgagatgaagtttcactcttgttgcccaggctggaatgcaatggcacgatctcagctcaccacaacctccccctcctgggttctgattctcctgcctcagcctcctgagtagctgggattacaggtatatgccaccacgcctggctaattttgttttttagtagagatgaggtttctccacgttggtcaggctggtctcgaactcctgacctcaggtgatccacccacctcatcctcccaaagcactggaattacaggcgtgagccaccacacccggcctaaataaatacttttttttttttttttttgagacggagtcttgctctgtcgcccaggctggagtgcagtggcatgatctcggctcactgcaagctccgcctcccgggttcatgccattctcctgcctcgcctcccaagtagctgggaccgcaagcgcccgccaccatgcccggctaatttttttgtatttttagtagagacggggtttcaccgtgttagccaggatggtctcgatctcctgacctcatgatccacctgccttggcctcccaaagtgctaggattacaggcgtgagccaccgcggcccgcctaaattaatacttttaaatggccttattgttatatggctgattcaaagaatttgcattcttttacaactgattgtaaaagtctaaacttcatattttccaagttctgaagtcctgtggctctgtgtactacagacgtaaaagttaatggttacaagattctgggaagcccagtctgtgactctgaggttttaaaattcaatctaacattttgaagtacatagatctgaaaatttaaggtcctccaactctggcctcttaggagtctttgggcccaaaacagtaaggttccaagactgatcctgcaactccattggctgccaaggagcaggacccaggaagctcaagcagcctcgtggcccctggaggccgtccagggcagtgcttacctgagggccatgcaggagtaggagtagcccacaaaaggcaggtggacccctagcggcgcaccttcccgaatgtccgacagtgtctcctgcgcaagacacacagatgtgagcagcagtcgtcagggcgggcccctcactgctttttgatcttggcttacatgttccccccaaaccagccccaactcagggcttatctaaagtggcccctccagcattttttcttttttctttttctttgatacggagtctcgctctgttacccaggctggagtgcagtggtgcaatctcagctcactgcaacctccgcctcccaggttcaggcgattctcctgcctcagcgtcctgagtagctgagattacaggcgccctctaccacgcctggctaattttttatatttttggtagagacggggtttcgccacgctggccaggctggtctccatcttctgacctcaagtgatccgcctacctcagctgttgtagtcccaaactctgggctcaagcagtcctccaacctcagcctcccaaagtgctgggattacaaatataagccactgtgcccagcccagttctgttttttttttttagatggagtcttgctgtctcccagcctagagtgcagtggcacaaccccagcccactgcaaactctgcctcccaggttcaatcaagcgattctcctgcctcagcctcctgagtagctggcattacaggcatacgccaccaagcctggctaaattttgtatttttagtagacacagggtttcaccatgttggccaggctggtcttgaactcctgacttccagtgatctgcctgcctcagcctcccaaagttctgggattacaggcgtgaaccaccttgcccaacccttttttttttttttttttttgagacagagtctcactctgtcacccagactggagtgtagtggcatgatcttggctcactgcaaactctgcctcccaggttcaagcaattctcctgcctcagcttccccagtaactggaattacaggcacccgagaccacacccagctaattttcttgtatttttagtagagacggggtttcaccgtgttggccagcctagtctcaaaactcctgatctcatgacccaccggccttggactcccaaagtgctgggattacaggcatgagccacagcgcccggccgcggtccagcctatttttttttttttttttttttttttctgagacagagtctcgctctgtcgcccaggctggagtgcagtggcacgatctcggctcactgcaaactctgcctcccgggttcacgccattctcctgcctcagcctcctgagtagctgggactacaggcgcccgccaccacgcctggctaattttttgtatttttaggagagatggggtttcaccgtgttagccaagatggtctcgatctcctgacctcgtgatccacccgcctcggcctcccaaagtgctgagattacaggcgtgagccaccacgcccggccagcccagcctattttttaatttcagtttatcttatttttgagacagagtctctctccgttgcccaggctggagtgcagtggcacaatcacagctcactgcagccttgacctcctgggctcaagcccacgtcggccaccctagtagctgagtatacaggcatgcgccaccacgcccaaccaatttttaaaacatttttgtagagacgggggtctcaccacattgcccaggctggtctcgaactcctgggctcaagcaatccacccacttcggcctgccaaattgctggggttacaggcgtgagccaccgtgcctggccccatcattttttcttgtatcctgttgcttcccttcagggcacctgccacactctccataattctctaattctctagactgcaactggatgagggcagggaccagagctcatctggtccgtgctggatccccagtattgttcagcaaaagggcacccagagccgagcaagcatgccatgacagcttgttacacggtgaagagagacggcctaagggaggaggagtcctctcctgcttctcatccctccaagtctcagctcagatagctccccactccagaaagccctccaggaccttccttgctgagtcaggagtcccccaccccctgcactccattgtctcagccctgatcactctggggccttactgtctgaagactgctctgtgttcccccactggactgtaagtctaggtcactgctgggtcctcagtagtagatgggcacagagcaggtgctctggggaatgagtgattcaggaccccagaaggtaggcactgtccttactccaactttatggagggagcatggggaggttcccgcagccgagcaggggccacaggtacctaccccgcccccgctcaccatggcagtgagcccgtcctccaccaagtcgaagttgcatgtgtcggtggcaccttcgaaatccggtgtaaaggggggcacgctgtcccggagaccatcccagtcgaggccaaagaagaagggatgtgtccggaagtcgcctgctccaccccggcccagccgtgtctccgggggacacagcaaccgctgaatgaagtctcgagcctcctcagggaccccttcgtccaccagcggcagagagaggtgctcctgctcagagggagaggaggcgatagcctgggagcgcctaccgggagaggccaggtctccctgcggccgtgctcaccttgtagtggacgatcttgccataggtctccgccgtggaatccgcgtagaagggcgtctgcccatagaacatttcataggcgaatacacccagcgcccaccagtcacactcgggcccgtagctgcctgtcccaggcccaccgcccacagcctgcaggatctcgggggacaggtagtctggggtgcccacagccaccagcgaccgcacctggaccaaaaggagcagagcgaggcttgggcccacccctctgggcccaccagctctgggccctccttccaaccactccccaaatgcttagcccctccctctgcctggtctaatactccgccacacagatgcacacttaagcctgggtcacaccacctcttttcccctccaaatccagtcccgctcccacactctgtgccttccatccctcatcagcagccccagttgctctgtggccagggcactggctcaccgttccatctgcccgcagcttgaggcaagagccgaagtcggccaggcggatgtggccacagcggtccagcaggatgttgtcgggtttgatgtccctgcacggaggaaaagagaagggtgggataaatgaacctcccttctgtggtcccaccaggctccgcccctccgggcagtgccacctgggaccccacttcctcgggttccgcccctgtagggcttctacagttctgacccctactcccaggcaccccccggtgggccccaaccaagaaggtccctctccaggccctggcctctctgggctctgaccttccaagaacccggccagggaacaagcttgctatcccctcggccatgctgcacccacctgtgcacgtagccaagccggtgcaccgagtctatggccatgacaatctccgccaggtagaagcgcgccatctcggccggaatccgctccccaaacttgctcagcagtgtcagcaggtccccgcccacgtaatactccatgaccaggtactgagaaggggttcgtcatgggtggttggtagtcccctgaggccctgatccatcacggatggctgggacaacccctcccagagacaccccatccttgggcagagacctgcagccccagcccagagataaccatagagatctgccgggccaaatcagagaccacctgcggcccccgcccccgcccctcaaaaaaaaacacaaacaaaaaaactttcctgggatgtcactgggcagattcactccccctgagatgttctgggaaagagaacccagaggccacccaacacccagagaataggtcccagacactccttccctaggcagtggccccgttagaattcctgaagacctatcccattccaggtaagagaccccccgcaacagagacatctttataagagtcccccagatcaccccagaaacgggcagtgaaggacaccatccccgtctcagatagggaaggcccctcatccacctgacacaccctcttaccgcacacagactttcccacagacgtttccgggcagcacccccaatcctagagcttcctctccccacctcctcgtccagtgacagcacgggctcttgtccctcttcctagtcaccccggcccggagctcaccaggtagttctcatcctggaaggcgaagtgcagctgcgtgatccaccgccggtccccattcaccaacacgtccctctcctcacggaagcacgacacctgcagggcacccggaggagctgcagccggagacggggcgcggatcctcaaagccccccacgtccgcccagcccctcacctcgcccctcttcagcatgtcccacttgttcatgatcttcatggcatacacctggcccgtctgcttcatcttcactaccgctacctgaggtcgagatagtgagacagagtggagacggcgggaaaacaaaagggctcgcccagacccaactccacccgcttctgcacccagccgtggccccgccccacctgccacaccacgcccattggtcccaagccccgcctccagcccagccctaggttctaaggctcggtcattcatcaatttctaaggccccgccccaacccctatgccccgcccaccacgagtcaagtcaggctcccgcccggttcggcttacctcgctgaacgccccgcgtccgatcaccttcagaatctcgaagtcgtccctctgcagtcggacctccttaagcctcaccacgatgggctccgctgggggggtggtgggggaaaagaaccgagggtcaccagaaagggcactggagacaagggggaaagccccaccctctgtctgtctccccttctctctgcctctcagcttcaccctaggactgtctgcttcccaggggcttccccacataaacaccgtgtaaggttctgggggccaaaaatgccctcccatagaggtgagatgcctgagaagccctttgcgggacagggcattggcccagagggctccaagggtgtgcaggatggttagggtggggtaacggagtctgcagaaggacagaccctaaagaacaaggggagaaggaaataagacccagttcttccaccttccaccctgactccaggtgacagttcaggtgcagccagggccccacccccacgttctcatgtagaatgtcctgggtaacggcccagacgtggggttgtatccagtacctctagattcagatgcaggtggttcttgaaccacactttggaaaaccctggatttggggctgggggaaggaacaggacagggagacaaaggtagcatggtcacatatcccagactcaagtgctccggtccagcccatctctcagtcctccaggaggagtgctttagtcctaccccttatttacagatgacaatcaggcctctcagaagtcaaggtcctatgactaggaatgttaaactgggcagcctgggtgggggaccagctggggtggaggcttgtggctcagggactgtggggacagggaggcctggactcccgggggtggaagaagtggaggcaggatggagagagggatgggtatgggaggggagggaaggagaggagacagtgggttctggaggaaagagaggggttccggggggttccgggagagtgggccagcagggacgaaccagccagggctgaggacgggggagggaggagagagccaagacattgagcccttttaaggcagcaggaaccctggccccctcccccgccccaggcctggcaggggaggggccgcgagatgcagctcgggccacaaaaggagtgctcctcccgggagcgccagacccctaccccacccggtctcagtttaccctgccaacccaacttcatcctctactaaagggaggccaggagagtcattaggggctgtgggaggttgggagaaggtttttccagaggctgaatggcctggcccttcttggcctccaccttcccatctgtgaaatgggaggaggagggaaaggaaccaggcctgggtcagaaagagatggacacaagaggaagcaggggaaggcggagaaacaggaaacaagtgtcacacacagtttgttacacacaggccaaaaaccaaacaccagtcactgagggccagacatatgagggccagaggggcagggtgctgggaatgaaagaaaccagtgaccagtgagcccgagtcctgggcttggggaggaggtgggcagacaaggcagctggcagaagcggaagcatcctccttccagccctggccccaggccctggaaagcccttgcaagaaggggttttgtgggacagctggaaggttggaggccctgggccaggagaactaaaggacgcagggacccggggtggcgggaatggtggctgacccacacggctcataggaaccgagactttggggctgggggtgggggtgggtgcagaacctacaaaagaaggagacacacccagaagaacccaaagttgtccctcctggatcgcagaggagggggcactggtggcgcctgtctgcaaagctggttctcccacagggcccgcgtgagtcaccgccctcccagtgcctgggcacctgttggggcagctggagaggctggcgccgaacacctgcctgtcggctgcgcccctggcagctgccccatgctggccctcctggcttgccccaggccacaggaaaccaggggagagggccatagagcccacttttggggggagggtcctaggagagggagctcccagcatgaccctgaccctgaccctgaggcggggtgcagagaggccatgggaggctgttggcagcctagcctgctgtgactcctaagccatggctctgagtcacagccaccctagcctctgctgaccttactctgcccctccagagtggtggcataggacagagaaatgttgccccagggcccaggtccacactctgagccccaggatgggaggatctccccatgcccatcctgccatcctgcccccccaacagccaggcctctgtgcccagacctgtctcctgccccacccccaccccatctgcaggagccccgagggtaggcactcaccccactgcaagaagtcggccacgtacttgtcctgggccagttcggaggcgcccagctcctggtggacgcccaggagaaggtcgagcaggggctccagccccaggaagcccgggtccaacaccagctgctggagccgcctcagccgcacctcggctgacatgttggacaggcagcaccatggcccctccccgggccgggggctcggggtcctcctgtcacagggcctggcagcccctgtccaggccctggagccctggctgcatgtctgcctgtccctggctgtcccctgggcctctctggccacttctctctgcggccggccgaggcctcctccccttctccccaccccttggtccagcccccctcccgcctcccagccttaacccctcacaagccagccccccaagctccctccttccagggcccttcagaacccttcagtgctagagtagggggaatgcatggagaatctcagctgtcacactgtcaccccaataaaaaggtagagcacagaggaagccacaggtgtgatgaatttcaagaagaacctgcccattgctgaaacagggccaattgaggctgagtgacccagtagcaaccacccccttgctcccgacaagctccagaactgggggctagggggtgagggctgggggttggggctgggtgggagaaaggggttgaggcctgggaaggggacgggaggccagggcagcttcttgggtgactcagagatggattccgactcggacagttaaatttagccctcaggctctctgctttataccagctttttttttttttttttttttttttcccaggaggtggggaaggggtggtgaggacaggaccaggagggggcaccctcagagcctgaacaggggtgacctgctgcccaaaggctgggggaggaaagtggtggagccaagccctccctgggcaaacgagaccccaaaatagctccttggcccctggccggggagccacattcctgcccaggctgggattagaaacagaaacatttcggggggtggagggtggcgcgggaagacacactccctgcggctccgagagccaagaggaatctgagctcttctttccagggtggacggttctccagagtggaagtcggggcctccaaccggcctggggtgcctgggccttgagagggccaggcctgagaaactaggaggcaaggaccgaggagtcccagctgggcagggcctgggaaacgtggtcctgggcagttctgataatttaaaaaacaccgaggactttgatgaggggccctggctgcgggcaggatgctcttctccccaagagggtcctgctccagccgctggtgtgggtcaccagttgtgtgactcgcaggtccgttccctccctgggctccggcttttcctgctatgaaaaggggtgggaggcgctgggctgggagcaggcctgcactcctcctctggggaaagcggactgcctagaaccacagagtacacacacaggtcctctacatcatctcctccgaaggggacagacccgctgagaaaacagggaactttagtataaataagaggtcctgcgggacagggaggaacctgaggggcttccataatttaacactcttcaaaagcacagacaatagcaagggcagctggggtgggggccgggcgagggctggaccacccccggccctgcccactcaactgaggggcacactgcagacctggggctcttgtggcaggggcggggagtctctccccaggagtgaccagtcacatgctggggacagggatgagggtaacactgatgtttcagaggaagaggtcattgtacttggcagtgggtgggggacaaggctgaggccacaagggctattacatcgcccgtgtccgggccagtctggggggcccccaaattttgtgcaggtggggggactggagcagtccatccatcatggttagtcttgttaatacgttgatctgtgaggtcagcagggagggttatggctaggaggctgggggcatggggttgggggggcccgatatccatggcttcacaccactgtgccactcggggagttgcctggttgggaggagatgccctggggaagatgagagggagagatgggaggggttagagaccacctgggcttcagccagtgtcaaggggagggagccagcccagagtccccaaagctgctgccaccctggccttgcccttgggtccgccctagaccccccagaggccactgctctaggctgggaacttgcatcttagctagcttcctgtcctggcagtcagcactttcacgcaataatcaaagtccttggcggatcctgagtgagaccatggggtaagggtaagggtgggaggggagggggaaactggagctcccttctaacttgggagggaccctgaggtgctggggaaagaactcagggacagtcctacctctaccactgacttgctgggtgacctgggccaacttccttcccctgtctgggcctcggtctcctcgtctgtgaactacggagacagaggggtctcttttaggactcaaccagactccccaaatcccaccactcttgcctctgagtcactcagactgtgctctcaagttctagggactcaggactctacgattccaaaactgaggatctgaggaaccaagccacggcctccaggaccctgggcaactgagtccaagccctaagaagctgagacacccaagacgagctccgaacttacaagatgccaggcctgattcgcctactatgaccttcccaacgccacagcccacccaggaggcaagcacatccacccactgcccatcctacaggctctgttctaagaggtgatgagttggaggtcagagggggcagtgacttgtccagggtcacagagggagtgggactggaacccaggcctgggattcccagcctgtgccttcagcaggaggctcagatcctgagtcccagacccaggctggcagccatgcccacaggcttgagctcgcccctagttttggcctgaagtactcaaaaaagtttcacgatttaaaaaacagatgttcaacagaaatagattctggttcgagtgacaggcagtaagacctggccatgtggggcccatctgctgcccttcagacggccagccttggatgccccaattcctagctggctctcacacccacccctctttctgctgcctgctgcctagggctagaccccctcactctaaggatctgagaggtcttgtactgagacactaagatttccctggcttcccctcaccccacggagccagaggctgtgacagcaacaaagccctctctctgccaatgcctgcctcttcccacgaaaggtcctgccaggtccccggcaggctggtgtggggccactcaccgccttgcccggccgggcccaggtgcagatgaggccctcctggcaggcagtgatgatgcagtcctccaggaacaggaggactgtgagccgctcctgggcgatcttcttgcacacaaggggctccagcaggggcacctcgtggatgcgcgggcacagcgcagtgcccagcaccttggcggggtccaggcggctgcggggaacagggccgctgggcttctccccaccactgccactgccgccactgccaccccggctgatgttgcccaggctgtggtagcgcttgtgctccttctctgccccccggtcccgccgctcctgcagtgtgagcgtggcgaagcggccaatgctgaatggtgtgccaggctctgccgccacacccgggccgcccgccttgcccccgccagctgggtgcgggagactgttggagcgggacagcgagcgaggcagggggcctgggccaggctcgccacccctcgagctgctggcggccggtggcgtggtgccaggtgtgccagggagggtgcgggtgcgggccaggggggggtgcgggtagagcacgtcttcagtgaggtcccacaggcagaactgcgtgtcctggcccgccgagccaaagcggtaagtaatggagccagccttgggcagtggagagagcggggcgcccccggccgagcctgtgcccgcagcctcgggctcctcctcctcctcttcgccgctccgctccccatcagcaccggctgctgtcgccgcctcctctgcccttgtggtgtaggggtcaaaggccacagcgttgacccaggacttgtggccatggcctcgagccaccacgcggccctcggtgaaggaccacacggtgaccaggtcatcttcgccacccgtcaccacgtagcggccgtcagggctccagcacacacacagcaggcccccaaagtagctcttcatgagcccacgcaggagcatggagtcgaagtggaagacgcgcaggcagccatcctggctcacacaggccaggtgccggccatcgggcgagaaggcgaactcgttgaggggcccctcacccaccgcccacttggccagcgggttgcggggtgccttgctcttggcagcatagacagagaagccctcgccctgcttcagcaggctgtactggggcggggccgaggcgcaggggtggctgacgttgtacaggtacaggtggccactggcgtgtgatgccaggaacaggctctccgactcaggcagccacttcagatatgtcaccttggtcttgtcgatcaaccgctgccaggggagacagtgtggggttgggagaaggcagtaaaacccaggcagaacttctccccgacccaaagtccccaagaaggccgttggacatggccccgctcacacagcaggtgccacaccaggcccaggtcctcctcggagagaagctcccaaactggggaagacagatggacaccaggtcatggaaacatggggaaacagaggctgctgcaaggtggccacagggtgctccaaggagcctcgatgtcccatctttggcgaggggacagtcctgcttgccacagaattgtcctgtatctcggggtcctcaacctccgggccatggaacagtagtggtccgtggcctgttaggaaccaggccatgcagcaggaggtgagtggtgggcgagcaggcattacagcctgagcccagcctcctaccggagcagcgcaccattcaatcctcgtaagagtgcgaaccccaccatgaactatgcatgcgagggatctaggtgtgcgctccttattagaatctaacacctgatgatcagaggcagaacggtttcatcccaaaaccatccccccaacagtctgtggaaaaactgtcttccataagaccagtccctggtgccaaaatggttggggaccactgtatctgtctaaccctcccccgatctttactacgtcaggcttcaagtaggaaatttcttcacggaaaggcagctccccaaaggaagcgatctttgtttggttcactattctttaaagcagtgcacacaggaggcagcttgaaggtaattcctggacaaatgagtgacaaccccccatcccgctaggtgcttagacaaaaaacctcggcatctgcccctcttttcctcatccaatccttccacaaatcctgtgggctcgaccttcaaaatacacccagaagtggctgggcgtggtggctcacgcctgtaatcccagcactttgggaggctgaggcaggcggatcacaaagtcaggagttccagaccagcctagccaatatggtgaaatacaagtagagatacaaaatctctactaaaaatacaaaaattagccaggcatggtggcgggcgcctatagtcccagctactcaggaggctgaggcagaattgcttgaacccgggaggcggaggttgcagtgaggggagatcatgccactgtactccagcctgggcgacagagcgagactccacctcaaaataaaaaaaaaagaaaaaatacacccagaatctgacctcctctcaccatcccattcaaccaccccaagcctgcaatgctgtgtgactggcctcaggctccaatgcctgggcctgtctgtcctctgcagccgccacagcgatgctctgtgaagtatcagccagcacctggcactgtcctgctctgaacacttcgcagcctctctcaagcagggttccagagcctgaggccctaatgctctcaggcagccagtgtatgcaactaaggagctgctctcccaggatgaggtgcctcccatccctgggagaactgaacaaataatcactctagtcacttctgccttccagggctcaggtgagccccaatgagaaaggctcctccacaggcttccaactaagagtaaggcaaaatctctccgtgaccttccagactctccatgagccagcccctccgttatttcttggaactcatctaccatcttctctccctcagtaactgcactggccacacggcttctgtgcaatcctgcatttgtcctagctggccccgatactcagaatgtccttcttggctgggtgtgatggctcacgcctataatcccagcgctttgggaggccaaagcaggagaatagcttgagcccaggagttcgagaccagcttgggcaacacaaagagaccccgcctctacaaaaaatacaaaagttagccagttgtggtggtgcatgcatgtagtcccagctactcaggaggctgatatgggaggactgcttgagcctgggaggcggaggttgcagtgaacgaagatcgtaccactgcactccagcatggacgacagagtgagaccctatctcaggaaaaaaaaaaaaaaaaatgcccttccccaggcaactcttctcacctgcctccttcaggtctttatttcagtatcacctcttagtgagggctttcctgaccaccctactaaactctccaagcttccctcagccccttccccactgcttcttctaaacaggccttaatcacctgctgacacacgaagacttaacttgattaactgtctgtctccccagctagactgaaagctccaaaagggcagggcctcctgtccagggccctgagatgtgatatccctagtgctgggaacggtgcctggcacagaacggatgctcaaaaactatttgtgaatggatgagctaatgaatttttaatccactgactgttccgttcactcccttcagccattcactcattctgagaatatttatggaacacctcctctggaccagagagaatgagacagaagccaagagcagtccctgcccgcggataaggtcgtttactggtatctcctcgtaggccaagttggcccaggactgagcaatctccatgtatgattctacaacagcggtcctgcaaggtaggaactggaatcccattttgcagaggaggagaagtgaggctcagagaatggtcaccttcccaaagtcacatgatgagtaaatggtgcagcagggctttgaatccaaagcctccagagcccagaactcaaagagcaagggcatcaactaagtcccgacttatttactagcctcaattctctaatctgcaaaatgggcagcacacttctgtatccactggttgatgaaaactcaaagaatggccgggcgcggtggctcatgcctgtaatcccagcacttcgggaggccgaggtgggcggatcacaaggtcaggtgtttgagaccagcctggccaacatggtgaaaccccatctctaccaaaaatacaaaaattggccgggtgtggtggctcacgcctttaattccagcactttgggaggccgaggcgggcagatcacgaggtcaggagatcgagactatcctgactaacacggtgaaatcccgtctctactaaaaatacaaaaaaattagctgggcgtggtgctgggcgcctgtagtcccagctgctggggaggctgagacagaagaatggcgtgaacccgggaggcagaggttgcagtgagccgagatcgcgccactgcactccagcctgggcgacagagcgagactccatctcaaaaaaaaaaattagccaggtatgatagtgcgcacctgtagtcccagctactcaggaggctgaggcaggagaattgcttgaacctgggaggcggaggttgcagtgacccgagattgtaccactgcactccagcctgggcgacagagtgagactccgccttaaaaagaaaaaaaaaattaaaaacaataaaaattacaattacaattaaaaaaaaaaaaaagaaccgggcatggtggctcacacctgtaatcccaccactttgggaggccgaggtgggcagatcacgaggtcaggagatcgagaccatcctgactaacacggtgaaaccccatctccactaaaactacaataaattaggcgggcgtggcagcaggtgcctgaagtcccagctactcaggaggctgaggcaggagaatggcatgaacccgggaggtggatcttgcagtgagcagagatcgcgccactgcactccagcctgggtgacagggtgagactccatctcaaaataaataaataaaagaaagaaagaaagaaagaaaacccaaggagtaaagtattcagcacaagggtaacacagcacagggcctgggtacagtaaaggcagctgtcattagctgctgtcaccccattctccatctctccctggtcctgcccctctcaggcctacactgttccgcaggcagctgcatcctaatggcatatagtgggtaggtgagaaggcagagaagttgggggctctgggggctgcaatcacctcctcattgaacagcttgctggtgtcctttttgatgagatccaggtactgcacttgacccgctgagaagcccaccagcagcgagatggtctcggtggcagcagtgaactggttgaaatcgtggcaggtgggctgggtgcccttgtagatccgcttgtcaattggcttgttgaggtcaatggacttgaggggtgggagaaaaggagttaatggtgtatgccactgaggagaaggaagaggatgttgaggttgggggaaaccactaagaggaagcagggttagaacccagagggaagtggggaggtgagtaggtggattgcgaaggacggggcaaccacagacgggaaggggacccaaatcacagacaagagtagcaaaaaagatggtaaggatcccccttgaccacagtgcctccccaaagttgggtcacctctaattcagagacacccttgtccacataatcagggttctgggtccacacagttcctaagctccgattccttttagcctcaccactccatcctataacctcagcaactcccttgggacctagtaccacactattccaagacccccaaaccttgaggtcacccaaatttccaggactctaaagcctaacatcctagcattctcttcactttgtagtccctaaaccgccacagttctgggacccgtcaaacctcacggtctcccacattttaggcccatttattacctaggggctccgaaggatccccatcatttctgggatcaccataaacggccagggttctcaccacatcgctttagagatgtcctgaatcacacctgcagattcccctgccagggcctctcattcccttgagagctcccatcagcttccggacgctcatctcctccaggaccctcatgacttccagaccccaattttctctagaatcccattcagcttctggatcccctatcaccttcaaggcccccatcacttctagacttctcctcattcctgggctcaatctcaagacccctctcccacacctccaggctgcaatactgggttctccatcacctctgggcttgcatcacctcatgattccccattacctgcagaatgcctgccaccccagaacccgggggatcccacctcatctcagataccccatcatgtccaatagtcaccatcccagaactcctacgcataacgggggtaaaggggatttcccccatcacctccaagatgcctgcccagcaccccgcgggcctctcatcacatttcagaatcctgtactccctccaatgctgtcgccctacaacgtccatcacatttagaatgcctatctcagggccccatatcaattcggggaccctcctatcagttctctggaacctccatcctttcagcacccagggccccacgatgcaggccgctcacccgttggctcccacgacgacagcagcctgggtagaaatagagctcacggcccaagttgaagcagacgcggtctccccccgagcccagccccgcgggcgtggcgggcggctccccggccccggcgctgtccggctccccgaggcgcacgaggctgaggcgcacggcgggcagggcgggcccgggtccggggcctgcgggcggcggggacgacgcggggcctgcagcgccgggaccggaggcggaggcagggccgggcgggggctgcggtggctgaggcggcaccggagtctgggcggaagccggacccgacctgcgagcggcgccgtcgcccgggagtagcttgtagaaaccctcgcgcgtgcggaattgcgacttaatctccgcgcagtcccccatggcggcgccggggcccgagccgccctccgcgccgcccgccgccatcttgggcgccccccgggccccgccactgccggactgccgcccgcagccgggccccctcccggaagccgctggcccgcgccggaaaaggtggggtcgtcgcccgggcaacgcctcttcgattggcacccagatccggaggcgggacgaatccccgcggtcgctcgggtaacggtgctgggactgtgggcggggcgagaaggtgggcgcggcctttgagcctgtgaccgacttgtggttggctgcgggggcggagcccgcaatggaaagaggcgtggccagttagaaagctcaagtccttagcaaccgcgccctgggaacgtttgcctagcaacggagggatttttttttttttttcccccacgacaaagaagccctcatccatagtccagccttcccatgaagtcacagccaaccccaagtgaccctggtctctccttagacgcccaatatacactcccctgacctccagtgtttcccactgacatattcaaatccctgaatgaccacagcatctgctaccattcttccccacccttggtgacccaccaaatccctgtgtccccacacaactcagaggacttcctctgacccactattgattaatgctaactccaaacatccttcatattttccaccaacctccaatgtatatttccatgattttcttattttcaacaacctcacttgtcctccaaaacctacctctgattcccaaattgtattgatccccacggtgccccagtgtcccagtgatccactcgtaacccaaagtctccccctgatcccaacagctcctactcatagccagtgctccccatgtctgctgaagccacccagccccatcatagatctttctagtctcatgtagtcaatggcctctacgatttctccctagagtgtcccaagggcatctcacacttaaaaaaaaaaatcctacaatggttcgggcatggtggctcatgcctggaatccgagaatcccagcactttgggaggctgaggtgggaggatcgtttgagcccaggagatcaagactgctatgaattcacatcactgcactaaagcctgggggacagagtcagactcagtctctctaaaaaaaaaaaaaaaagaaagaaaaaagaatcctacaatgaaattgacgtcttacaccaaatcctccacctctcttgcatccccaccttagggctagctctgccgtccactcagtcaaccaggccacagacctgggtgtcttcctagatgtgtaccatttatcttcactctgcccccgcttacagcctccaagtcttttgcattcgaccacgtggaattcctctttctcagttccttgttctccctgatccaagcttctcctctacccaagcccttcccccacccccacatcaaccgtgtctcttggtctcccagatttctgtctcacccccacttccacctttcacttggcatgtagagaggttttattttgtttttgtttttgttttttttgagacagtctcaccctgtcacccaggctggagtgcaatggctccatctcggctcagagacggggtttcaccatgttggccagtctggtctcgaactcctgacctcaggtgatccacccacctcggcctcccaaagtgctgggagtacaggcatgagccactgcacccggctttttttttttttttttttttttttgagacagagtctcgctcttgtcacgtgggctggagtgcaatgggacgattttggctcactgcaacctctgcctcctgggttcaagtgattctcctgccttagcctcctgagtggctgggattacaggcacctgccaccacacccagctacttttttgtagttttagtagagacggggtttcaccatgttgggcatgctggtctcaaactcctgacctcaggtgatccgccaaccttggcctccctaagtgctgggattacatgtgtgacccactgcactaggcctagagaggtctttctaaagcatgaatatgatcagggccctcccctgctcaaaacccatctgtagctccctagtgctctcaggggaaagttaagccccaagtgatctggcccctgccaacctcttttcaatctcatatctcaccactaactcctcacactatccaccacctaaaatgaggcttgaaaaactaccccaacatatcacactctctcttgtccttgggtctttgcacattctgttccctattcttggaatgcctttccccattcttttcttgaccctttaagagttggctcgggagctctgtcagtcctctgggcttccccatttgggctgtcactgtctggaaatgagtctctctccctatagtgttgtgaggtccaggaaggcaggactgcagctgtctgtgtccccagcacaggggtgggctgacaggaggtatttcaataatggtttgatggctaggtaaatgaataaataaaacaggtggggctggtcgcggtggctcacagctgtatcctaacactttgggaggccaagacaggcagatcgcttgatgccaggagttcaagaccagcttgggcaacataaaccccatctcatagtgagactctgaaaaattgaaaaaatttagctgggcatggtgggctgtgcctgcagtcctagttactcaggaccctgtctctacaaaaaatacaaaaattagtgtatgtggtgatgtgcacctgcggtctcagctactccggaggctgagatgggaggactgcttgagcccaggaggtcaaggctgcagggagctgagattgtgccactgtactctaacctgggtgacagaatgagaccctgtctcaaacaacaacaacaaaaaccaaacaggtgggagagactctgccaggcaatgtctgtgctctctgcagggcccaacagccctggcttggagtccatgtcaacagaggtggtgaacaaatgaatgaatggctcatccataatgccgtggaggaattttatttgaagcagttgccttccttttctatccctgccctctggggacaggaagcacatagtgaaaatataatccatgctaactacctctaaggggaaatttgctatctacctgcttggggaaagtggctagagggtgggcctcagtcatctgtctcctcgccctcctcctcctcctcgccctcctcctcctcctctgtggctcccagggcttgttcctgggctgctttcagagcctgctcctcttccactgtggggtcactcatctccatgatctctgggccactggggtactcttgttgaatgggggctggcagggccgggttgaagctctcggggctgtacttgtgaccccagccgatgtagatgttctcaaactttctggagaagcagtgagacactgtgaaattctccctcaaaggccccagacttgacttttttttttttttttttgagatggagtcttactctgttgcctagtgcagtggtgtgatctcgacttactgcaacctctgcctcccaggttcaagcgattctcctgcctcagcctcccatgtagctgggactacaggcacgcgtcactacgcccagctaatttttgtatttttggtagagatggggtttcaccatgttggccagtgtggtctggaactcctgacctcatgatctgcccgcctcggcctcccaaagtgctgggattacagacgtgagccaccgcacctggccagccttgactttctttaagggtaggacccagcatgtgcatagcatgactgcaaagttgtggatggcagggtgaaatgtgctcactgggttcctctgtattacccaggctggatgcaaactccacctcctgggttcactgcaaaatctgcctcctgggttcaagtgattctcccacctcagcttcccaagtagctgggactacaggcacacaccacctcgcccagctaatttttatatttttagtagagacggggtttcaccatgttagccaggctggtctcaaactcctgacctcaagtgatctgcctgcctcagcctcccaaagtgctgggatcacaggcatgagccaccatgcctggcctaatttttgtatttttagtagagagggggtttcatcatgttggccaggctggtcttgaactcctgacatcaagtgatctgccgcctccacctcccaaagtttaaaaattagccagttgcagtagcacgtacctgtggttccagctactggggaggctgaggggggaggattgccggagcccaggagtttgaggctgcagtaagttgtgatcatgccactgcactccagcctgagtgacagagtgagaacgtatctcaaaataaatcaagaaataagtaactaggctggacgcagtggctcacgcctgcaatcccagcactttgggaggccgaggcgggcggatcacaaggtcaggagatcgagaccagcctagctaacacggtgaaaccccgtctctactaaaaatacaaaaacaaaatcagtggggcgtggtggcaggcgcctgtagtcccagctgctggggaggctgaggcaggagaatggcgtgaaccctgggaggcggagcttgcagtgagccaagatcgcgccactgcactccagcctgggtgacagagtgagactctgtctcaaaaaaaaaaaaaagaaataagtaactaaaaataacaaaaaaaattaaattatatatgtggctcatattttatttatgtgagacataattttatgttggatatcaatttatttatattgtgacactttatttatgtccaacatatcatgtgggacataaataaaattgtctaggtgctggggacacagcagtaaacaaactagacaaaactccctgccaggtgcggtggttcaggcctgtaatcccagcactttaggaggccgaggtaggaggatcaactgaggtcaggggctcgagaccaccctggtgaaaccacatctctacaaaaaatacaaaaattagctgggcgtggtagtgggcgcctgtagtcccagctactcaggaggctggggcataagaatcacttgaacccaagaggtgaaggttgcagtgagctgagatcacaccactgtactccagcctgggcgacacagcgagactccatttcaaaaaataaaaaaaaaatccctgggttgtgcctacattctgctaagaggagactgataatgaacaaggaggtaagtgcccaggcataacccagcgaattcagcctttctgcagaattttaactagagaaggaagaggaatagatgggaggaaagggaggggactaagaggtagggagagagggagacagagactgataaagaggcagagagagccaagcatggtggcccacgcctgtaatccctgcactttgagaggctgaggtgggtggatcacctggtcaggagttcgagaccagcctggccaacatggtgaaaccccatctctactaaaaatacaaaaattagctgggcacggtagtgcatgcctgtaatcccagctactaggggggctgaggcaggaggacggcttgaacctgggaggcggaggatgcagtgagttgagatcgcaccactaaactccagcctaggcaacaaaataagactccatctcaaaaaaaaagaaaaaagaaaaaatttaaaaatgaggccaggcacagtggctcacgtctgtaatcctagtatgttgggaggctgaggtgggaggattgcttgaggccaggaggtggaggctgcagtgaaccgtgatcacgccactgcactccagcctgggtgacagagagagaccctatctcaaaaaaaaaaaaaaaaaggccaggcgcggtggctcacgcctgtaatcccagccctttgggaggccgaggtgggcggatcatgaggtcaggagattgagaccatcctggctaacacggtgaaaccccgtctttactaaaaatacaaaaaaattagctgggcatggtggcgagcacctgtagtcccagctacttgggaagctgaggcaggagaatggcatgaacccgggaggcggaggttgcagtgagccgagatcgcgccactgcactccagcctgggcaacagagcgagactctatctcaaaaaaaaaaaaaagaaagaaaagaaaaacaaaaacaatggaacaatgggtggacacagattgggtgggggacagaagagcgttgggtgggtgggggcagaggatggatggacaagtggagcctcaagtttgtatcatttgctttcagaggaatgttggcatatcagggtatagcctgaagaagggagttggcaaaagcaaacgtgcctcttcccagcttccagagaaggaaaaaataaatgccaggaatgtgttaaagtatccagattacatgcaatcccaccacggctgtgattcatacaggagcgaatacagtcccagttcacattgagattaaaaacgaaattctaggaaaaatcatcatgccatctggtggacaaagctggtaggtgcgcccacctccagcggcaaaccccctgtcacgcagcagggcagagggctgccaggtgcctgcgggggaaggctgaaggactgtggggagtgtgtagctgggtgggaggatgtaggagtgactttggcttgccattcttgtttgttttttgagacaaggtcttgctctgttgcccagactggagtgcagtggtgcaatcacagctcactgcaacctcgatctcctgggctcaagcaatccttctgcctcagccccctaagtagctgggactctgtagtccgtgccatcatgccgggctgattttaaaaatttttttaatttttttttttgtacagatagtgtcttactgtgttcctctcgctggtctcaagctcctgggctcaagcaatcctcccaccttggcaacccagagtgctgggattacaggcatgagccagtgcacctggcccaagcttgccattctttttggaacaactggtggtgggagggaaggtttctgccccatagagagaaaagccttccaactggaagaacaggccgggtgcggtggctcatgcctgtaatcctagcactttgggaggccaaggcgggcagatcactcgaggtcaggagtctgagaccagcctggccaacatggtgaaatcttgtctccactaaaaatacaaaaattagccaggcatggtggcatgcatctgtagtcccagctactagggaggctgagggaggagaatcacttgaacctgggaggcggaagtttcagtgagctgagatcgcactactgcactgttgcccagcctgggtgacagagcgagactccatctcaaacaaaacaaaacaaaaccacaaacaagaagaactgtccaggggaccccagggacggagttagctcctccagagagggattctgctgctgtcatcagggggctggagatccaggttcgtatcctgcaagtgctgtgtgaccatagccagtccctcccactctcttattctccttgctctcatcatgactcatcaccaagacccatcctagtgggctggtatttcccactttagccctggtgaaactcctaggagctatgagggcattagtccttggggcttcctgaagggggccctccccatctctgcccaccctggcgagttgcccagcccaaccaggcttgaagaagtcctgagagattctcctgctgggaggggctgggggaagacctacttgccactggcataggcataggccccgggccagaggttggagcgcacaacggccactgagtactgcgggcagaggctgcaggacaggcgggtggtccagggtgccaggtgcatgatttctgtggtggagaggcagcagaggggggcagcagggtcagggaggcccccaggccctgcactgcaccctgaaggaaggaaggcagcagtgagggaggcctggaggggcatgaggggaactatagccaccaacagctcgggctgcggtgtttgaaccctcgctgcagaccacacacacacacacacacacacacacacacacacacacacacactctctctctctctctcgctctcttttttttttttttggagacagagtctcgtcgctttgtcactcaggctgcagtgcagtggtgtgagctcgactcactgcaacctctgcctcccaggttcaaacgactctccttcctcaacctcccgagtagctgggattacaggcatgcaccaccacgcccggctaatttttgtatttttagtagagacagggtttcaccatgttggccaagctggtctcgaactcctgacctcaggtgatccacccgcctcagccccccaaagtgctgggattacaggcgtgagccacctcgcctggcctggaccactctttctctatgtggccccaggaagccagttcacctgtctgagcctcagtggctgcacccaggaaatggggagactcatctggcctttgttgcagggtggcagtgaagcctggtgacaaggtctgcagcacacctgctgcagtgcctggcgcccagcagggcctccagactgggaagccactgtgattccactcccgagttggtcatcggtttggaccagggtgcagagggaagggcacaggctggcaggatctggcttcaaatccaggacctgtcccctggcccactcctagcctctctctccacttccctccgggtgcctgaggccccaaccttaaaaaattcctgtccattcatccaaaatccagctccaggttgggcacagtggctcctgcctgtaatcccagcactttgggaggccgagtaaggtggatcacttgaggccaggagttcgagatcagcctggccaacatggtgaaaccccatctccactaaaaatacaaaagttatctgggcgtggtggcacacgcctgcaatccagctactcaggaggctgagacgggagaattgcaggaacccgagaggttgaggttgcagtgagccaagattgcaccactacaccctagcctgggtgacagagctggactccatctcaaaacaacaacaatgacaacaacaccaccaccaccacacacacacacacacacatacacacacatgcacacacacacccagctccagtctttaggcagggttccccaactacatccccttccctccaggcccaaactcaaaaggccatatcctaaggtttaggccattgccacgtgtctatggacatgttcccagaacctcctgatggggccactgtgattacacccattttttagctgagagagcctctgagcctgggagggaaggaccggggagatggaccccagcagtccagccacccctccctttcttcccagccctccccagccagtggtgtacaggctgagagggcttccttacctgcatcttctgaaagtggcgttagcagtggggggccaacctcctgctccacctcctctggcccctcatctgccttctcttcctcctcccccaggtcctcctcctcctctgtcttctgcaaagggttcacccaagtgcagcggccctgggggtggggggaagctcaggtgatggccccagtgcacggaacccagcctgcctcctgtgggggaggtgaagggccaacaggcatagccttgtcctcagagacccaggcacaggcaagagggcaagatttagccgcacagctaaggggaggtgggaaacgggctgacagaactgctgtgttgaggtgaggactcctgactgtgcgacccccattcatgcattcattcactcattgaatttttttttttttttttttttgagatggagttttactctgtggcccaggctggagtgcagtggcacaatcttggctcactgcaacctctgcctcccggtttaagtgattctcctgcgtcagcctcctgagtagctgggattacaggtgcctgacaccacgcctggctaatttttgtattttttagtagagacggggtttcaccaagttggccaggctggtctcgaactcctgacctcaaatgatccacccgccttggcctcccaaagtgctgggattacaggtgcgagccattgcacctggcccactcattgattcttttcttttttttttttgagatggagtctggctctgtcgcccaggctgaagtgcagtggctcactgaaagctccgcctcctgggttcacgccattctcctacctcagcctcccaagcagtggcttacgcctgtaatcccagcactttgggaggctgaggcgggcggatcacgaggtcaggagatagagaccatcctggctaacacggtgaaaccccatctctactaaaactacaaaaaaaatagccgggcatggtggcgggcgcctgtagtcccagctactcaggaggctgaggcaggagaatggcgtgaacctaggaggcagagcttgcagtgagccgagatcacgccactgcactccagcctgggcaatagagcgagactccgtctcagaaaaaaaaaaaaaaaaagccaggcatagttgtggtggtatgtgcctgtagtcctaactactcgggaggctaaggtgggaggattgcttgagccctggaggtcagggtagcagtgagttatgatctcatcactgcacgccagcctgggcaacaaagcaagttgctatgtcttaaaagaaaaaaaaagctgggcatggtggctcatgcctgtaatcccagcactttgagaggctgaggcgggcagatcacctgaggtcaggagtttgagaccagcctgaccaacatgaagaaaccctgtctctcctaaaagtacaaaattagttgggcgtgatggcacatgcctgtaatcccagctacttgggaggctgaggtgggagaattcgcttgaactagggaggcggaggttgcggtgagccgagatcacgccattgtactccagcctgggcaacaagagcgaaattctgtctcaaaaagaaaagaaaagaaaaaaaaaaaaaaccagccagggcgcagtggctcatgtctataatcctagcactttgggaggccaaggtaggcagattgtctgagctcaggactttgagaccagcttgggcaacacagtgaaacctcatctctactaaaatacaaaaaattagccaggtgtggcagcgtgtgcctgtaatcccagctactcaggaggctgaggcgggacaatcgcttgaacccaggaggtggaggttgcagtgagccgagatcgtaccactgcactccatcctgggtgacaagagcgagactctgtctcaaaaaaaaaaaaagaaaagaaaagaaaagaaaaagaaaaaaaagaagaaagaaagaaaagaaaaaaaaatgcctctgtccccaaaggtttctgatgggattatccgctaatatctgttgaaccaatgaatggatggatgaatgaacgaatgaatattagttgcccagcagagagtaagagcttgatgtcagtattgcagggtcatgcgtgagccccctgctcctgccgtttgtgagaggcgggagtcccggcgctcacctgcggcaggatgtgctgtgtgtgatgcacccagttggccatggagtcgaccagctccagcacggggatgccctcgaagtccgggttctcctcgtaggagtcgcgcccagcaccaccttcctcctcctcgtcgccctcctcctcactaaactggtagaagcccagcgggctgacctgcgtggcggccgagatgcgggctatctgggcccgcaggtagttggcctcgttgcccgggaagggtgggtagctgacgactggcgtgtccaggtagcctgtgaagaacttcttgatctttcgggcgttcacgatctgggctggagtgacgtggggcagccgcgtccatggcaggcccggctcgttgcacacaaagtacaggtacttgttggcgcctgagcggctctcctccttggggatcacgggcggcggcttccatacggacttagggacgatgtccacggccttctcctcgtcctcctcgccctcctcctcgccgtgcgcctccatgacctcgccaccttccgtcatctcctccacctcctcctcctctgcctcctcctcgccctcccggaattccacctcggccaccaggtagctgcgtttgattcccaggatcttgccccagaagcgacaggtgtggatgggctgctgctccaccagctgtttcatggccaggaaaatgcggaagctctcgtccgagctcaggccgacgccggcctgctcgaagtagaaggcagtctccatgatgttgggcactggtgtctccccctgcgcagggtagggtggagggcagaggggagaatgctgaagctctgctccctagcctacctcttccagactcttctagagtcaagagagctaaaagaggccgggtgcagtggctcacgcctgtaatcccagcactttgaaaggccgaggctggctgatcacttgaggtcaataattcgagtccagcctggccaacatggtgaaactctgtctctactaaaaatacaaaaattagccagccataaaagcaggtgcctgtaataccagctacccaggagactgaggcaggagaatcacttgaaccggggaggcggaggttgcagtgagctgagattgctccacgcactccagcctgagcaacaaagtgagacacggtctcaaaaaataaaaagaggcctgatgtggtggctcacgcctgaaatcccagcacttagggaggccaaggcaagcagatcacctgaggtcaagagtttgagaccagcctggccaacatggtgaaaccccgtctctacaaaaaatacaaaaattaggcaggcgtgatggcaggcacctgtaatcctagctatttgggaggctgaggcaggaggatcgcttggacctgagaggcggaggttgcagtaagccaagatcacaccactgcactccagcctgggtgatagagtgagactcccactcaaaaaaaaagagaaagaaagaaagaaagaaacctaaaagattctgtaactcagctgctcaggccacttgtgctggccagtgagatgtagggaaagcccttggacaggatgtccctgatggagaagaaaagggaaaaccacactaggagaaaatttttcttgccttttgtcattccctattcttcctgcctggaatggggatataagatctggagccacagcagctatcttgggaccatgaggcaacacatgggagacaaagtactacacccttaatggtggtggagatgaaaggtggaaattgcctggtccccagtagcattgctcagctgccttacccaccctgaccttcttgctcctgtaacaaagaagccacttttattcatgatttctgtgacttgaggcccaatgcactcctaacacatactccatgtttcacagaaagttaagggagaagacaggtctcgaacggaggagtcagtgatgttagaggatggtaataagtcctgtcttcactgcctccatctataccgtgtgcttgattcacacagccagaggatgggtggggtggaggagaagaaagaaggagaggaggaggaggaaaaagaggaagaaggaaagaaagagaaagacagaaagacagaggctcagaaagggactgaaggcaagcaggctgaaactagaagccagcaaagtttatggctgggcgcagtgattcacgcctgtaatcccagcactttgggaggccaaggcagggaaatcacaaggtcaggagatcgagaccatcctggccaacatggtgaaatctggtctctactaaaaatacaaaaattagctgggtgtggtggtgggcgcctgtagtcccagctactcggaaggctgaggcaggagaatggcatgaacctgggaggtggagcttgcagtgagtggagattgcaccactgcactccagcctgggtgacagagtgagactctgtctcaaaaaaaaaaaaaaaaaaaaaaaaaaaaaaaaaaaaaaggaggccggccaagttttggctcagaagccagagaaagaagaagtgtaatgtacatctgcacgggccacacaccaatgctcttccttctcccagggaaatgcctgccagcccctatccatgtggccacaaggctgtccccaacactttattattcaaccagtcccaaaatctttattatttatttatttattatcattatttttgagacagagtcttgctctgtcacccaggctggagtgcagtgatctgatctcagctcactgcaacctccactcctgggttcaagccattctcctgcctcagcctccccagtagctgggattataggcgtgcaccaccacacccagctaatttttgtatttttagtagagatggggtttcaccatgttggccaggctggtctcgaactcctgacctcgtgatccgcccgtcttggcctcccaaaatgctgggattacaggcctgagccactgtgcctggcatattattattattttttaaaaattattattattattatttttgatacagagtcttgctctgtcgcccaggctggagtgcagtggcgcaatctcaactcactgcaagctccgcctcccgggttcacgccattctcctgcctcagcctcccaagtagctgggactacaggcgcccaccaccatgcccggctaattttttgtattttaagtggagacagggtttcaccatgttagccaggatggtcttgatctcctgatcttgtgatccacccaccttggcctcccaaagtgctgggattacaagcgtgagccactgcgcccggcccattactattttttgagacggagtctcgctctgttgcccaggctggagtgcagtggcacaatctcggctcactgcaacctctgcctccaggattcaagcgattcttctgcctcagcctcctgagtagtcgggactacaggtgcacaccaccacgccaggctaatttttgtatttttagtagagacagggtttcaccatgttggccatgctggtctcgaactcctgacctcaggtgatctgcccgctttggcctcccaaagtgctgacataacaggcgtgagccactgcacccaaccagtgatgggatttataaccaagatactgtgatgctgaaaacagctctctttgtttagggacagctagggagcctgggagtgtggggaataggcagctctcagtgcccttcactgcagagccaccttgcaagactaggaccttaccagtcctagactacacctgacgattctgtgtgagaaaaatgaccaactcatccaagtcacttatttctatttatctgacatcatctatatcctaacttaaagggacctatgttgtcaaacaagtaaaataaggtgttagtttttggaatgtgccaaaataatcctaaagttagtctaaaattatagatgtgggcgggcgccatggctcacgcctgtaatcccagcactttgggaggccgaggcggacagatcacctgaggtcaagtgttcgagactagcctggtcaacgtggcaaaatcctgtctctactaaaaatacaacaaattagccaggcgtggtggcacagcctgtagtcccagctactcgggaggctgaggcaggagaatagcttgaaccctggaggcagaggttgcagtgagctgagatcgtgccactgcactccagcctgggcgacagagcaagactccgtctcaaaaacaagaacaaaaattagccaggcatggtggcgggcacctgtaatcccagctactcgggaggctgaggcaggagaatcacttgaacctgggaggtggaggttgcagtgagctgagttcacaccactgtattccagcctgcgtgacagaatgagactccatctcaaaaaaaatggaaaaaataaaataataaaataaaattatagatgtgagaatagtcaaaacttatctttttttttttttttttttttttagacagactctcactatgttgcccaggctggagtacagaggctcaatctcagcccactgcaagctccgcctcctgggtccatgccattctcccgcctcagcctcctgagtagctgggactacaggtgaccgccaccacgcctggctaattttgtttttgtatttttagtagagacggggtttcaccgtgttagccaggatggtctcgatctcctgacctcaggtgatccacctgcctcggcctcccaaagtgctgggattataggcgtgagccatcaagcccggccgagaatagtcaaaacttttcttttttttgttttttgcttttttttttttttttgagacggagtctcgctcttttgcccaggccagagtgcagtggtgcaatctcagctcactgcaagctccgcccaccaggttcacgccattctcctgcctcagcctccccagtagctgggactacaggcgcctgcctccacgcctggctaattttttgtatttttacaagagatggggtttcactgtgttaaccaggatggtctcgatctcctgacctcgtgatccacccgcctcggcctcccaaagtgctaggattacaggtgtgagccactgcgcctggccttttttttttttttttttttttgagatggagtctcgctctgtcgcccaggctggagtgtagtggtgcgacctcccctcactgcaatgtccacctcccagtttcacgccattctcctgcctcagcctccctagtagctgggactacaggtgcccgccaccatgcccggctaattttttgtattcttagtagagacagggtttcacttagccaggatggtcttgatctcctgacctcgtgaaccacccgcctcagcctcccaaagtgctgggattacaggcgtgagccaccgtgcccggctagtcaaaacttttcaaaacagaggttcagtgatggggagaattatgctaccaaaacagcaacacctgccgtgcagctgctgtcagcagtaaacaggagagtcctagagcaggaagccatccacagagcaaaggccgggagcagagactcctgcaggaccctgtgtggggagcagatggtgcaggtggcatttcaaagcagtgggggggcaggaaggaatggtttattgcataaatgccattcaaggtcctggctagccgtctggaagacagaaaacgagagaaataagagccttgccttgacagaaaaagaaacacaaaatgctgaatcatgcattttttatgagtcatttcctagaagcatgtacaggccacaaaagcccccagttttgcccttccacagaccccacattaagaactccagctcttggctgggagtggtggctcacgcctgtaatcctaatactttgggaggccgaggcaggaggatggcttgaggccaagagttcaagaccaacccggccaacatagcaagacccccatctcaattatttttatttatttatttatttttatttatttatttttttgagacagagtctcgctctgttgcccaggctggagtgcagtggtgtgatctcggctcactgccaagctccgcctcctgggttcatgccattctcctgcctcagcctccggagtagctgggactgcatgtgcctgctgccacgcttggctaatttcttatatttttagtagagacggggtttcatcatgttagcaaagatggtcttgatctcctgacctcgtgatctgcccacctcggcctcccaaagtgctgaggttacagatgtaagccaccccatcctgccaagactgaagttgttttgtgactggattgtgcaatgctgtctttcgcctccaggccttggcacaggctgtgccctaagtatgcttgggcccccactgaccctgatgcccacctctcctgactggctcactcaccacctcctcctccatctcctgttcgccttcagtgccgcctccactccgggtgaacagcgccttctgtttctccgccatcttgtaggtgggctgcatctcggggtcgtcccgcagcgtgtccagcttggggtggaaccactcccactgcgtggtgcggttcagagactccaggacagacaaggggtcctcaggccgctggttcaggatcttggtcagcagattcaccaggtgctcgtacctgcctcccgcaggaggagtgggaggagagggacctcactcactcagctcactgagctggctcccatgtgcctggccctgtgcctggtgctggggacacagtagggaactgaaaaggtccctgcccaggtgtagctgacatttatttatttatttttatttatttagtttttgagatggagtcttgctctgttgctcaggctggaatgcagtggttcatctcggctcactgcaacctctgcctcccgggttcaaataattctcctgcctcagcctcccgagtagctgggattataggcgcccgccaccacgcctggttactttttggatttttagtagagacagggtttcaccatgttggtcaggctggtctcgaactcctgacctcgtgatctgcccgcctcagcctcccaaagtgctgggattacaggcgtgagccaccgcgccttgccgacattcttatggtggaaacagacactaatcaaacgagcaaaatatatacagtgtgtcaggcatggggtggtaatttttagggtgacacatatagtactgaatggggcctgggggtgccagggatgggagaaggtttgcaattttatttttttaatttatttttcagaggaggtctcgctgtgttgcccaggctggagtgcagtggcacgacctcagctcgctgcagtctctgtctcctgggttcaagcgattttcctgcctcagcctcccaagtagctgggattacaggcatgcaccaccatgtcccgctaatttttttgtattttttgtagagggtttcgccatggtggccaggctggtctcaaactcctgacctcaggtgatccaccttcttccgcctcccaaagtgttgggattacaggcgtgagccaccgcacctggccaacatttgtattattattattattattattattattattattattattattattagagacagagttttgctttgttgcccaggctggagtgcagtggtgtgatttcggctcaccacaacctctgcctcctgggttcctgggttcaagtgattctcctgcctcggcctcctgagtagctgggactacaggtgcacaccaccatccccggctaatttttgtatttttagtagagacggggtttcactatgttggccaggctggtctcgaactcctgacctcaggtgatccgcccgtcttggcctcctaaagtgctgggttaacaggtgtgaaccaccgtgcctggccaacatttgtattttttgtattttttttttgagacagggtctcactttgtcactcaggctggagtgcagtggctcggtcttggctcactgcaacctctggttcccgggttcaagtgattctcccacctcagactccccagagctgggattacacgtgtgccaacatgcctggctaatttttgtactttttgtagagatggggttttgccatgttgcccaggctggtctcaaactcctggactcaagtgatctgcctgcctcagcctccccaactgctgggattacaggcgtgagccaccaggcccggccacagtcagcctttgaaaccaagttggtctgatttccaagcatgtatgtgtcaccttttgctttgcggaagctgttttgttggcagtcttgggtgtggtgttgggccatcatggaagttgggaagggtaagaagaggtgagactttggctagggcttctcaggaagagagcctgaagctctgaagagctggcacttggggaatagccagaggttaattctgactagattctaggatccgaggaaggagcaggtagtgactagaaatcaagtttggtcagcggccaggggctgaaccacgtaaggccttttgtttgttggtttgtttgagacagagtctcgctctgttgctcaggctggagtgcactggcacgatcttggctcactgcagcctctgcctcccggttcaagtgattctcctgcctcagcctcccgagtagctgagatcacaggcgtgtgccaccacgcctggctaactttttgtatttttagtagagacagggttttgccatgttggccaggctggtcttgaactcctgacttcgagttatctgtctgcctcagcctcccaaagtgctgggatcacaggcatgagcaaggccttatatgtctcaggccaggagccttgaaggttgtggtgaggagtctgagcttccccctgtgggcaatggggagccatagcaggttctgagcattggagggacacggccagctttgtgctttaataagaaccattacttcatcaacctcatttctcccgctctccctcttcctcccttggttccagacacaccagcccctccttactgctcctcaaaaacagcaagcctcagagcctttgcatttgcagtgtgctctgcctggctcactcttcctccggtcatctgcaagatgctctccctcgactccttcagggccctaatcaaatgtcacctccttggacaggccttcactgacccacacaatttatttttttgagatggagtctcgctctgttgcccaggctggagtgcagtggcacgatctcggctcactgcaacctctgccgcccgggttcaagtgattctcctgcctcaacctcccgaggagctgggattacaggcccatgctaccatgccctgataatttttgtattttttagtagagacagggtttcgccatgttggcaaggctggtctcgaactcctgacctcaggtgatccgcccgtcttggcctcctcaagtgctgggataacaggcgtgagccaccgcacctggttggacccccactatttcatgtgttccctagccctcttagcctcccttatttttcacctgagtccttagcttcagtttatcactttttctgtttcttgtccactctcctagaatgagagcatcctgggtatctaatggaggctgagagcagtgttttgtgactgtagctaagtggctttggcaagtatcttcctcaggcagggaggtttagttgcaggataagagggtctcaggagggctgggcacggtggttcatgcctgcaatcctagcactttgggaggctgagatgggcggatcacttgaggtcgagtttgagactagcctgggcaacatggtgaaatcttgcctctactaaaaatacaaaaattagctgggtgaagtggagcgcgcctgtaaccccaactactcgggaggctgaagcagaagaatcacttgaacttgggaaggagaggttgccctaagccaagaccacgccactgtgctccagcctgggtgacagggtgagactatgtctgggggaaaaaaaaagcaagagggcttggggagccaaatcacgtgttctggaatcctgactctgccatatcctagctgtgtagttttgggtaagcgacccaacttctctgtgtctcggtctcctcctctgtaaagtaggatgagctgatgtgctcatctccggtgagaattaggtgagtgtgtgcagtgccagcacatgtctgggaagtgaatgctagctgttgttggcattgattccgactcagctgaattagagtcactggttttccatgagggatgatcccttgtctgactgactgaggcaggcacttcgggtggggcccctccctgcctgggtcccccacccgccccactcctagcccctgctcacaggctgaggtcgcaattgatgctggtctgcagcaggtaggccttggcgttctgcacggccagctccagaggctcgggctcaggcacctgggcactgtagtgtgggaagcccagctcagagggcaagaactgaagggcagggtcatcccttatgtaaggcccgtgctgggcaccttcagagaactggtctgtctggtagaggttgaactggcccaaggggttgactgggggctcctggaaggtggggtccagttgctggaacaggctgctttggccctgctggagccgctgcagcattaggctggtggtgagctcggcgacctgcatcctgctttcatcagagtaaggctgaggctggaactctgagggaaagcccgtgttcacagatgggtactccatgccacccagccgggcttcctcagcctggaagacctggggcatcagcaagttctcctgttgggacaggctgcccctctgtgaccaaccaggggcgtttcgctgggcgtctggaggtatctgctgcctctcctcggggtccgctgccagggcctgagcttggtcccgactgtgccgcctctgggaggcctgagaagtcctccggcccggaggctgctgggcagggcgctcagggtagggcggcaggtctcccatggttcgccaggaggcacagatctctaggagaaaggcttgcagacaaggaggccaagcgagagccacctgtcgacaccgccggtttctgagcaccgagagagggggccgttacccgtggagggcgcggggagcgggccagggtgggttccgcgcaggctctgggcgcgcactcccgatcccgcgcagccccacggtggacgtcgcgccagactcgagacggcacccgcgccccaggcccgccatccctttttttttttcttttcagtaacttgcccaagttcacatcttttatttctttttaaggcaaagcacccgcaggtcaagccccgccccgtcccccagccccgagtccctgtcccaccccctttccccctcgagccccgtcagctgttccccttggcctcgggttccctggcgtcctcggcagccgggctgggagtcttcatagcatcttctccaacaggtgcgagggtctgggggctccgctcctccttcaaggtcagcccgcccgctgccgtctcctggtgaccggggaaggaaagggcagccgggtggagggcgcggtcacctccacgctccccttcaggccctgccccctgatggcccctcctcccccaccttcaccccggcccagatccggcttcttccttcgcagcggaggctgctctccctaccttgggtagggggccctcgagactagagtccaacagcgcggcctcggtcagccccgagtcgtcatccatgctgatgaagatgcccggggtctcgcactcaggcccctcctcccggaaatccatggcttcctcagacgggggcgggcctggccgggccgacggagagggagagggggaggaagaggagggggctcccactcctcccggcttcagcttctgttcctcctccagctgccgctttaaggccttctcctgggccagtcgcaggccgatgaggtcctgagggggccggggtgctggggccggggccaaggtcaggggctccagatcatcctggggatagggagggccacacagaagctcagaggtgggtggctcagaggacggccggaaagagaaggaaccaccctgaggtggtctttgagttcttcaccaagagcatggggaggaaggggcagttgtcccccagacccccaactcccagcaggagcatcccctgggagacgggtggcccagaggcaggggtggcctgagtctctcggggtcaggaggaggccatggtgagccttgctggcttggggtagggggtgggagtctggggatccagatgggtgggctgcagggccctcacctcctccaagggccccgcaggcgcctccttggcctctggctcctgcttgccgctggcctccaagatggtcatgatggagttagggatgtgagcttgctgggtggagagcaggaagggggcgctgggggcagctctggcacagagaccccatttgcacacctcaggtccgggggccctaaccctccagaactcccagcagtgcagggccttcttgtgtccgcctccatccagtccccaccaaccagagggacccagggggccgcccaccgcacaccctgggtggggggaaagggtacctggtggggggaaggggtacctggtggggggtgaaggagcggacatgggccagcaggggctcccggagctctgggcacttgtcaaagacggctcccagctgctggggcggcagctgcaggatgacctggaagctctggggctttgtgcgctggcagcacttgatgaagccctcccacaccttggggtacttccacacctgaaccagggagggagggagccgtcgggagaggcacacaggcatccccccgagccttgacactgggagaaagaccttgccaagaccatgcccaaatcccaccatccaagattcctctggatgggcaacaagcagccccgacctccctccagaggcctttgtcttcccgatccaggcggctggaccacgagggcaacttgggaagggggtggaagaaaactcagccgccttttaccagagctccccctgggccaggcccaggctaagtgctgcgggagcacctctcatgacattctcacggcagcctccagggggcgaaattacccctgctaaacagcggaggtccgtgccggtgccgggacctgtcctgggtcacatgtacattctcaccgcagcctccagggggcgacattagtcctgcggggtttggtttttttgttctcttttttttttttttttttttttttttttgagagatggtcttactctgccgcccaggctagagtgcagtgagtggcgcgtttcttcctcactgcagccccaaactcctgggctcaagcagtcctcctgtctcggcctcccaaagagttggcattacaggtgtgaaccatcacacctggccttatcgtggtatttctaaagcccaaatttctagcacctcttaaaaaactgggccatttttcagctctgggatgcatcctggccgggcacacagcggtggagggtgaggagcagccatgcctctcccgggtgcacaccccttgagggttaccacagctcctaccacccagctgccctccctcatcacctgggagctggcccagtcatacaccctggagcactgctattttcttggcaggaggcagagcagagcctgctgtcctccaccgggctccctccggggtcagacgggggaaggggagggcaagcaggctagaagctgctgtctgcagcctggaggcggggtggccggggatgggttacctgcttcatgatgaggcgggacaggatgttcatgacgaagccccccaggcgggggtacatggtcagggactggatgacggtcctcatgagcagcatgggcagggggctctgctccatcagctgctgcatcaccacggccagcacctctgacgtgtacacgttccgctccgcaaagcacaggttggtggctgcgaggaggcggagagtgggcctgtcctctctgcccagctgccccctgggaggtgggagtcccggcctctgctgtctgcccatgtgaggggaagacttctaaagccctgacttctaaagcccctgcgggagagaggagactcccccgacccagcagaaggcacactgcaagccccgcccttggaaaacctgcaggcttggttcaagggagaagacatccaactccaggaagccccaaaatgggtggaacagggaacccgtggcccctcactttaaggacgaccttgggaaagatgtgttgccaagccctgggggagtggcagggccccccacccctgctagggagggaaggcagctattggtttctaccagcccctccagagagaacagcagtccacagaccagcttgtcagagggccaagggactgcccacccagtcctgacaaggatacagggcttgcgctggtgctgggaagatggggggtgccaggctaagggctgtgttgggcatatgggcacaatcagagtaatagcgaagggagggacaagagaaggctggggccggggcatacgatgaccccccgactcaacacccagtgccagtaccagtaggacccagagggttggcacagcacaagcacccatgaaggcaggccctggggtctgttccccgagtgggtggccatgccccaatccacagtgctaatgggaggccccaggagctgcctttgaagcccttccccaaacaccacttgccatgtgagtgtcaaccaggaagtctttattgagccagaagagcaccccaaccccccaaatccttgagaggctaatggagaacaggggtggggtctctaagggggggggcgtagacaggtggggaggaggctgaatgggcagagcagacagtggaggtgaggacctgccagaaaccgaggaagcccctgctcctcgtcagggccaggtggtcactggtcctgcctgctcagccaccccaaggctccagaatcacccctcccctcttccttccctgtcggctttgccccagccccccacctgggcctcccccgagcctccgatccattctccatatagcagcctgaagggtgttttggaaagctcagacctgacttgcctcccagagaccctcaagaaacaaggtcaaattcccacctcggcctgcgagactcctgtgtgggcaggccccaggggcacctttcccaatggcgacagcctgacctcctcccttgaccaggccccctccttcgtcccctaggtccagaaccagccagcaagcacctccctcggtccctgcagtctcctgctgctgccgcctactcatccttccttggtctcagcctgagtgtcccctttttcgggaagtcttccctgatgtcccacacccaggctgggttacatggcccctctgggctgcccagtcccaggccacccctctcagttgttactggccagggacttcttgtctctccctggactgtaagccctggaaggacagggctagggctgtctttcctgtgtccccagcactacccaggatggatatgggtgagcagaggtgctgacttttcttaatgctggactaccaggagtgggtctagttatagacaagctccccagaggaacagggtggtctacgggggagtgaacagtgcacaacaaaaggactcgactttgtgatctggagcttagagtgcaaccaggaagactgctggtgcctgagcaggagaaaaacttgggttgggtgctggggacaccagctggagggttgtctggcctgcagcgtgcacgcctgggcgtgttgaagggtggggtggtgtagggtaggccctgctgacccctctgggggcctcactcctggtggcctgtgtggcctctggcaaggccctttctcctgggccaaggatcttcaggggcctggctcctggtggcctgtgtggcctccgacaaggccctttcttctggacctaggatcctcagggcttctaatctgggtccacaaatggccttggggtgtgtgtgtgtatgtgtgaaccccctcaaactgtatgcaaataatatgagcatactgtcctgggaatgggctagaactttcctcagatcaccaaaggggtcggggaatgtgaagaccacagccctggcctatgagcctggagatctttcctccctgctggtctcccacgagaggccttggtgcctcctgggttttataatgtgggtttgacatttccataagctgctctcttgaccttaaacgtttctcagagaacttgcagaggaaggttaggaagtaagtcactgaaaagctgtttcaagctagaacacgaaagtaagcagcacagagaggaagccccttcccgtctgagggtgagaagagaaatcaaaggacagcagtcttctgagtatagagggcgacagtgagggtgtccagctccgtgggacaggatggctcctggcccagaaaccttgctcaggagggatggaggggtgggcgctctcaggggaggtggtccttagacgcggaaccggcagagctgggattcccacccaggtccgtttcacttcagattctgtttcttctaccacaccacttagcttctgcttggccctgagtaagtcacctaacctctctggagcctccatttcctgtctacacaatggaagtgaacatacccaccaagtggcggaccagcaggctcaggcctgtaggcgttcagggagagcccagcgcagagtgctcagtgagtgggggccatcgtgaggcggccagttcgtcaccaaccctgccgccctgcaggcaagctctcctgcctcacctaccctggcccacaagtgccctggagccctgggtctgccctgctgctgcgcctctaccactcacggtgtgccctgcttccttctgttcctcggggctaggggtggggctacccaactgctttaggcccactctgtgccagggcacagcaggtacatcagaggcagaaaaaggtgggttgtaaagggtaaaacctgggaggaaggaaggaggagggagggagggagggagggaagaggaggcaagaaaaggagggagggagggaggtggctctccagagctctgaggtggggctgtgagtgacagtctttgacttggcagattccagtgggggcatgtgggtgactgaggtcctgccctggcgtcgcaggggccaggccactggagtgggggggaagcgcctcacctttgatgatggatttcatgtcgcacttcacggagtcaatgttgtgtaatgcgatcaggagctctccagggttcagcggggacaaggctgagtttccctcacctgcagcaggcgggaggaagggtgggggaagacagtgcggacgcataagtgaagagatgggtctgagttccccagatcgggggagctgcgagcaaagatgaggtgccctctgctttcagggctggaacaggggaagcgactgacaacataaaaaggggacaccgaaggcagcagcagccctcaggcagcgtgaggttgccactgtgtgctcctccccatcctgggctcccaccctgggtagcgtgtggcacggctgggtctctctgcccctgggctgtgcacccccgagggcagggtaggaccacctcctcgtgtggtccccaacacagactccaccgcggcacagggggtcatgggcatttgtggcacagggcaagatggagccaggctacaggcttccaaaaagtggctggagccttctgctgtgtggggcctgggggagtggaggggaggctggtggagtggctctttgctgctgctattttgatggtcccagagccatctatatgtgtgttttaaaccaccagggtctgcgtggaacagacatcctccattttttctctagcaccaaccactggggtaagggtgaacaatcccttgctagtttttctaagttgaaagttttgcttctttttttttttttttttttttgagatggagtctcactctgtcatccaggctggagtgcactggcacgatctccgctcactgcaagctccgcctcccgggttcatgccattctcctgcctcagcctcccgagtagctgggactacaggcgcccgccaccacgcctggctaattttttgtatttttagtagagacggggtttcactgtgttagccaggatggtctcgatctcctgaccttgtgatccgcccgcctcgcctcaagttttgtttctttttgactgtgtcaaaacgaaatgcccctggcccacagcttgagggattcgggcaagatctgaggaggggccagactggagccgggcctgagaggggctggtgtgtggccagatcctaaaagggaagatgctgctggagcctccgcccctagctccacggtcttgcccctgctgtgaatgaaaccatcataaaaatatcccagagggtggcctgggagctccgggacacatggagatgtccagtacagctggtgtcccagggagcaggatgtgccctctctccctgaggggggtgcctgcaccttgccttctgccccagcacctggggtgggtgggcctcttggtggggatgaggctgcatcacctaccatgctgggtgcccagcaggcggttgaagacttccttcaccacgatggggttgagtttgatgagtttaggcagggcctggatcacctctttctacagggagaaggtggtgggggtgggagttgagtcacatacaccctcatttcccttctagacaagccaccccttctgctcgccctggggagctgagggcaagctctggctcactgagcccctcctaccctcaccacaccctcagggcggagctttctccccagctctcaccccatctgagccccctgcatgtcacatgtgtgtgcccccaagaggcatcctgatccttgtctgacagaggagaaaagcgagtctcaaagaggggaagggacctgcttgaggtagaggaggaagcagcagagccattggcacccgggtgcccatgcaaatgaggccaggagctgctccgcatttccagggtacccaggtgtcggcggcttccatgacttctgaccacaggcaaggtgccttctgccctctgctatgtgcctctggctcaactgctgctgaagcaacgtgctgccctgcccctcccagtcccacatgtcccaggtagcagggacaaacaggcctccagctccataccttctccagcccattgagcaccgggatgaggaagcggacgtctggcagtcgcttgtggtagagatcccggacccgcttcaccagctctggggagggtgggactgcatggaagcagcaggaggcaccaagttggaggcggaggggagcgtgggaaagggtgggcacccaggaaagagaagcaggcaggtgtgcaggaagggatggcaacttcacccttggctgctcacgtgcaattagcaccacactgttccaaatggagaaactgaggccctaggacaggcacagacccgcaagaggtacgaccatctggggacccagcagctcagatccccagggcccggggaaggctaaggagagggaggaaagccatgaaaggtgggggtctccagggtcacctttgtctgtgaggctgtgcagacatctcgtgaccagtgtctctgctcccttgggacaattttccaccagcaggagcagctccggggagttcatgcccattcctcggatctagaggcagagacagggatgaccagacccagggtgagagcttaggggagggtcaggtgttgcccggcagggtggcttgcggggcatgctggcgcccagggtgagactgaggtgacagggtttggagggcgggggaaaggtggggaagggcaggagagtcagaagaaccttggcatctccctgcagctcctccagacatgggcctgctccagctcccagccctggctgggctgtcctcctgcgggccactcctctgtggctcagacttgacctgacctcgaatgcccaccctgtgcttcgttcactggtgaagatgtttctggctccacccacctgcttcgtgactcggtttctcaggcgcagctggcttggctgcgagcccagaccaggctccacctgctgctgcttcctgagcctgctctgcggtgaatgccaaacaggagccagggccaggctccacctctgcccagtaacgtttacgctcctgactaaaaccgactgtctctgccctcgagaagctcacagccctgccagataacttttctgcaaagtgagatcacttttccacagctggaccaccttgagaatggggctaaaaatctgtttcctcccaactacaagcctgttatccccattttccaggtaagggccccactgaacccaaatggcagataggtggggattaacatacacttctctctcccgtttatcacgaaaatgttctgtaatccaaaaatgtcaggggcagaaagaaaaaaagtggtttcaaatcctgctgcaaactggaagagcagaccttctaatctcaggtgctagtctgtcactgagctgcttctcatgtgggcagacctgtgcctctagagagaggggcaggaaggacttatgtttatgtaatgacagctaaagagtcccgttagcaacactgggaaggccagctcataaagtgacagtaacacagaggtttatgtgcctgagttcatggactccttgcatcagcgtggagggactggaacgtcttccccatttttactgacgggcccaaggtcgcagtgagaaagcgagaagtgaacgcgaacccaggtctatcagctccaggctcctaactgccgggccacttgacgtttcctcaggagtgacatgcggaccgcctgcaagctacacagcctgggtcggcccggggtgaccacccttcgggcttggcacactctgaggtggagcaggttggggaagagctggagctggggacacagccttgcccgtgggtgggcagggcctggtgggctcaggggcctcaccggctgctcaatgaccctcagcaccgtccgcttgatgtcggcgatggcttcagtgtacacggccgccagttcgtggatcagcttgtggttctgaggcaggagggccaggtagaggtacagacactgcttcactgtctcctccgtccagggtgctgccacctctgacagggcaggagcgggcatcagattggcccacactcttctccaaccccctcggaccctcaggaatgtcccttcttgggcagtggagccggggagggcagagaagggagccggggctggggagctaattgttctagggcagggaaatggcggggaccaggacttcccacctccagcctcccgtgactgccaacacacaaggcaactagaaggatctttctaaagtgcgatcctgaccctgtccctctctggctccaatcccagccatgcctgccctgtggcctcagaataaacccccagctccctgcctcacactgtctgccaggtgttgtatggggtggccccggcccgctgctgctctgctgccctccatgttggtcacatacccattctaacagtcccgagggccctggtctctttgcctttgcatccaccctcctctttgcctggtccacggcacctgctcagcttctgggcctcccgaaggctgtgcatctcctgggaatgcttcctggcacctgggccaggcctcccgtgctgccctatcatggcccaagccttcccatttaatggtccatttactcggggtctgagtctacctgtctgtaatccagggctctgctgagggaacctgcctgagatggccctgcctggtccttcctcaggccccaccgatggctggctctcctcgtcctccagatctctctccctgaccccccaggctgggccagatgccccctaccctgactcccacagcccccaggtggctgtcccagtcctgcccattcccgtcactcgtgtccgagtggcttccccactcatcccctctgctcgcagggcccagagcgcggacacagcagcgctcagtatgcatctgatgacctgtgcccaacctgtgtccttgtcagctccaaacagcacagacggtgggttggggtgcaccaggagctgcaggtagttgagggcaaatttctccacatactcccgcagctgctccttctcatacatgcgtttgatgaacagcagggcctgggagcgcacctgaggaggaagatggagaagggcagggtcagggaagaggtaagaggaagaacagctattcctgcgagcatggcaacactcacgtgaaaacaagcccgaggctgagaaggggcagcccagctgttaccagggcccagggctggtccccagtgcaggaggcagatatcctggccagggccggacccgcagcaccacctcactgcctgcctctccagcccatctgcccatcactgcttcttgccttgctcactaagctccaagcagagggagagctcctcagttccttaaaagtgccactccctgccaagtctccctagaacgtctactgccagctaaaccctgtttcactcagatatcatctgccaggagccgtgagggaagggtctggtcctgggcactctgaccccagcagcagcacatggccatggccagggccagggccaggggtgtgagatgaaggtctgctgaatgaatgaaaacgctacccagcaagggctggggcaaaaggctgcaggcaacgatgggtcaagggcgctctcaaccacagcacgtgcacatctgtcccctctgtctagagcacacccagctactgattttccaggtctcagcgtacaagtcccctccttgaaagaagccttccttgaaacacctcccctgcccaccccacaaccagatggtcggcccctccctccccagggcagccacacactgctctgctcagctgctgagcacgctgtgtcctcactgctggctgaggccacaccggctcccctgctgggctgggcaatgccctcaggccccggcacaggactgggctgcacgaggagcctgtgctggccaccacgggtggactaagagcgagagtgggactgcccttcccaggagggcaagcgcacgtgtgtgtgtgtacacactacaggcagactcaggcacggtaaccctggtttctaggcagcttgatgccactgaaaatgaaaataaaacagacagaaatagccaaaaaaccactgaaagaagggaatgggcccagagaaacttgcaagggagtgtggaagacgtgggctggttactcaggatagaggcggcctctgcaagctgcaggctgagggcagccaggaagtggaggaggggatcaccttgtccttctcatgggagctgaggtcgaggaggacatgcaggtactggaactggcgggacgggcgcttgaagatcaggtctcgaagtgtggacatgcccagataggtgcgactctgcagcaaaaggaaagggacccgagctcagcccacctgagtgtgcctctgggctctgtctttcctgcctgcctctgatcaggtacctggacaaaagggcccggtccctcacaaaacccccggccacaaggtttagactgtgtgcccttcagacccctcagggcagggccctgtcccctgccccgggctgcactgaccagggcctgtcctcacctcatcctcgcagtacttgcggaccacctccagggcactctctgtgatgagtggcgcctccagcacaaccttggtgaagatcctgccagagatggagggagggccatggctgcagaggaagaggccgcctggctcccgggccctgctgaattgtaggagctcagggccagcaggccctccctcaggggctgcttgttcaagcccctgcttataaagctttggaggtgaacagaacagggttcaaaagctggcggctggatgatctgggcagagactgcacctctctgaaactcatttcttccgtttgtcaaacagggattcctaactttattcactgaacataagaacgggagggaatgatggcgggtggagaagggtgtgggtattttagatatggtggcctcaaaaggccgctttgaagttacagttgagtacactggtggatgagaaggagccacccacacatagagttgagggaagagcattccaggtggacagaacaggaagcaccagcgccctgaatttgacatgttcgaggaacagacagaaggccaatgtggctaatgttcggggggtaaagccaaagagattgggtcacataaggcctcactggtcacagtaaggaggctgtgttttatcccaagaccaatggagaaccatggaaggttccttgtggggaagtaataaaaggatttatataataaaatgttcctggagctgctgtgtggaggatagacgagtaagctggaggccacggatagggaggaagctacagaaccaactcaggtagtgaatggggtgtagagaagtctatctccaggcccatgggtgagcactgttatttacagatgggaaaatggcagagagagggagtgacaaagccacgcagagcaagctcagagcaagtggcagagctgaggaacagctcagggagtgcgacctggagcccacatgcaaaactacaaccttgaacgtgcctccagagggggaggaggagaggagacttgggatgggtgcgaggaggactgactcggggggtgacgaagagggaggtggtcgcaatcagaaagggagggcagcaccaggagaggaagcctctcggggacaggagggtgcagggtcagccccctcacccatccttctggtctggtttctcctgcaggccagacaacaggcggatgaggcagtcctcatacttgtccagggagcccgaggcacctgcggccaggtaggcgttgtactcctggtagagccaggcgaaggccaggtccaggcgggcccgcacatcctccaggatgaaggacaggacctccgccttcaggcccgagttgaactgtgtcaccaggctggccaggatctttatgcggacctggtgggagggtgagccagcatgtcagtgtagggtgggcaatccagggactccgcaatcgtgccctgcgacttctcccacccagacgcaggaactctcagagcagacaaggagtgaagcgaggaaggccagccgaggacccttatgcctaggaaggtcccgtttgtgtgttggggggtgggggtaccagggtggggatcgatcatcacagaataaaaatgagtttctaggagcagcacccatgtacttaagtgcacagaaaaagatcctcaaagattcccctcatttgtgcctttgtcacctttgaagagagggatggggtgcaggtgatggccacggaagagtactggatctggattccccggaaatatttttcagctcagggagtatgttcctatactactggctaatcaacaattaacttcacagaatggggaaaaagtcacttttccccattctttgaaggtaacagtgccagcaagtggcagaatcaggacagagaaccaggtatatttctaaagctaaatagtaacagtaagaacgttaacaaccgtgaagaaccaagaccacaagagcagccctcacttgcagaggcctcccagcacctgccctgtgcacctgagtgcctgtgctcattgcacatttcctcctcgtcacccaggaggagctgctgctactgtctctgttttatggaggatgggagtgatctggagaagcggctgtgggcagcagagctggggtccgcagccagggaggtttgacgccagggccagactcttcgctggatgtgaggtagacgtttgggtagagggactggaaggatggggtggggggtggcaggcgcacacctgggctgccccgctgcaggccacagccttctcagcccgcaggatccgcttcacagcgcccagcttcatggcttccacctgggcatcggtaaggggcttcagcacgtcgctgagacggaaaattttcttgcgcccaccagcgcctgccagcctgtgtggaagagcagtgacagagatgcagtgacccagactgcagcaaaggcctgtctggtgactctcccaacttcaaggactaggtaggcaacagagatggcccccatccccctgctgcctctccagttcctctgtgtctctgaggcacggtgtggcggtgggtaagaggaaggaagaggatgttattttggttttgcagagggcgtcttacggaaggcttctgtgagtggggatctgaacggaggcagggacaagatacacaaatgtctgggggaccagctctccaggcaaaggcccttaggtgggaacagacttgtgggcacgagtggaggaggggtgagggtagcagaagagagctcggagggtagcagatcccgctcagctgtgttagtaagacttggggctgggcacggtggctcacgcctgtaatcccaacactttgggaggctgaggcaggcggatcacgaggtcaggagatcgagaccatcctggttaacacggtgaaaccccgtctctactaaaaatacaaaaaattagccaggcgtggtggcgggcgcctgtagtcccagctaatcgggaggctgaggcaggagaatggcatgaactcgggaggcggagcttgcagtgagctgagatcgcgccactgcactccagcctgggagacagagtgagactccgactcaaaaaaaaataataaataaataaataataaaaagacttgggtggccgggactggctggattttgtggtgtgtaagggaggtaataatggggacaatgatgatgacagccagtagcatttactacacaacaggaaccacgcgaaatgcttgacaatcacaatcacttttcactcgagtatctagttacctaaccatcaccattaccacgaactaatttaattcttctttgatccttatgagaaagatactatcattatcctaattttagacataaaaaaggattttttttttttttttttacaggaaagagaacagcaaaggcttagtggttatggcactgactcgggagtcagagagaacctattccagacttccttctgtctgcatctcagttacacacacacacgcacacgcacacgcacacgcacacgagctgagaaccagaccttcagggtagggctcctgtcctgccctagcacccagaagaggactcaccggggctgagtgacagggataatgggctctggcctcctcttggcctgcggtgcctcttcctccaggggggacatggagctcagggaacccaccaccgagatggcttggccctgggctgacaggcgccgcttgatcaggacgctctctgtcttcaccaccttctcctccttgggctcctccttgcactgtttggtctgctctacacctgagggggaggcagcaaacagacacccagtgcgtcagacccacctgctccaacccgaggacctcctgtgtgcctggctctgttctgagccctgtacacacaaaacctcgtttaaatccacacaacactgtcctggagtgggtactctttttatccccacttttcaatacaactgaggctcaaactagaaatgccattcattgctggggggagcagcaaatgctacagccactttggaaacatgatgagcagtttttgttttttagactgggtgtcactctgtcacccaggctggagtacggtggtgcaatcagggctcactgcagtcttgacctcctgggctcaagcaatcctcctgcctcagcctctcagcctcccaactagctgggactacaggcgcatgccaacatacctagctaatttttgtatttttttgtagagatgaggtctccatatgttgcccagcttagtcttgaactcctgggctcaagcgatcctcccgccttggacttccaaagtgctgggattacaggtatgagccactgtgcccagccctcagctgttttttttggagacggagtctcactccatcaccaaggctggagtgcagtggcttgatcctgactcgctgcagcctccacctcctgggtccaagccattttcccacctcagcttctggagtagctgggattatagacacccactgccacacccagctaatttttttgttttcagtagagacggggtttcaccacattggccaggctggtcttgaactgctgacctcaggtgatccacccgcctcagcctcccaaagtgctgggactacaggtgtgagccaccacacccagcctgtagcagtttttaatagcactgatcacaccctatgacccaacggttccactccttggtatatgctcaagacagatgacagcatgtgtacatgaagagagttggacacaaatattcacagcagctttattcccaatggccaaaaactggaaagaagccacaggtccatcaataccggtgtggataaacaaatgattgtatattcatatgacagaatactactgagcaataaaaaaccaactagtacctcacacgacaacaatgaagaatctcaaaaatgtacagcaggctgggcgtggtggctcacacctgtaatcccagcactttaacaggccgaggagagtggatcacctgaggtcaggagttcgagaccagcctggccaacatggtgaaaccccatctctactaaaaatacaaaaaaaaaaaaaaaaaaaatcagccaggcatggtggcacatgcctataatcccagctacttggaaggcaggagaatcacttgaacccaggaggcagaagttgcggtgagccgagatcatgccattgcactccagcctgggcgacagagtaggactccatctcaaaaaaaaaaaaaaaccgtgaaaaacaaaaaattagctgggaatggtggcagcgggtgcctgtaatctcaactactcgggaggctgatgcaggagaatcgcttgaatccaggagacagaggttgcagtaagccaagaaagttctgctgcactccagcctgggccacaagagcaaaactccatctcaaaaaaataaataaataaaaataaacaaacaaaaaaacacaaaaaaccatatggcaagccagagaaaccagactttgtgatcctatttagttttgttcaagaataggtaaaactagggccgggcgcggtggctcacacccgaaatcccaggactttcggaggccaagacggacagatcacaaggtcaggagatcaagaccaacctggctaacacggtgaaaccccgtctctactaaaaatacaataaaattagctgggcatggtgccgggcacctgtaattccagctactcaggaggctgaggcatgagaatggcgtgaacccaggaggtggagcttgcagtgagctgagatcgtgccattgcactgcactccagcctgggcaacagagtgagaatctgtctcaaaaaataaaaaataaaaaaataaagaataggtaaaactagtctatggaggcagaaatcagaacactggttttctctggagttcaatgccctgaggcatctctggaagaacaaggaggaaatttctacagtggcaatggtctataaatccgaaactttctgagtctcaacaaaacacaagggtaaaattccacacctgacctcgtgtggatagatggcagtcaaaacatcatttcatgaacaaaattattaagaaatattacaggtccagtgcggtggctcacgcctgtaatcccagcactttgggaagccaaggtgggcggatcacaaggtcaggagattgagaccatccttgctaacacggtgaaaccccgtctctactaaaaatacaaaaaactagggccgggtgcactggctcacacctgtaatcccagcactttgggaggccaaggcgggtggatcacaagatcaggaggtggagaccatcctggctaagacggtgaaacccccgtctctactaaaaatacaaaaaattagccgggcgtggtggcaggcgcctgtagtcccagctactcgggaggctgaggcaggagaatggcgtgaacccgagaagcggagcttgcagtgagccgagatcatgctattgcactccaacctgggtgacactgcaagactgtgtctcaaaaaacaaaacaaaacaaaagctagccaggcgtggtggcatgtgcctgtagtcccagctactcgggaggctgaggcaggagaatcatttgaacttgggaggcagaggttgcagtaagccgagattgcaccactgcactccagcctgggcaacagagcgagactttgtctcaaaaaaaaaaaaaaagaaaaagaaatatcgtatataattacctttgagctatgtttagctcattatgagctaaacataaatgaatttcatgtttagacttggatcccatccctaagatacctcattatgtatatgcaaatactccaaatccaaaggtctgaaatctgaaacacttctggtcccaagcattttggataagggatatttaacctgtatcttgatctgggtgatggttacactggtgtgttcactttgtgaaaattcactaaggtctataattaagagttctgcatttcacttatgtgtatcacacattaatagtactgttaaaacagggtaaaactatgaagctcagagaggttaactaacttgaccaaagtcatacagatattaagtggatgagatctgattcaactcaaacttcaaacccaggtctgttggattccaaagcccaggacttaaaaacactgagccatctatctgtggtacctgtcattatctacaccttagctcccacatgattttcaactgcaccacgagaagttgctcttccagtaaggagaacccagaagccacaagtgccaatccctggcccaggttagggccaggacacactcacctggtcccagtccggcagctgtcatctgtgtggccatgagccgagccaggtgcttgatctgggcttccgtgcctgctgactccacgggggtgtagatggcctggaaggaggctggcatggcctcgggtaggtacaccatgctgatgaggacctgtgggatgcccaggaagagagcctctccttaatcattaactcaagaagcattctttccatgcccatgccaatactggggaaatggcagtgcctaagaccgacttgggcctgctctcctggggcccagcctcttctggaagtcacagagaaaacaaataattatatagtgtagtgcttgagagggtaacatgaagggcactgtgagccacagcaggagccaggcaaggcaagggctccctgtgcaagaagcacctaggctgagaactgaggggagggcaggagtcagcataatacaggacaaggttttgaggtgggaggggtgtgtattccccgtagagaaacaccatgggagaaggctaagaagcagcagagctggcaccctgtccagagaacaaaagaggccaggtgcagtgggtcatgcctgcaatcccagcactttgagaggctaaggcaggtagatcacttgaggtcaggagcccaagaccagcctggccaacatggtgaaaccctgtctctactaaaaatacaaaaattagcctggcgcagcagcatgtgcctgtaatcccagctactcgggaggctgaggcaggataattgcttgaatccaggcggcagcagttgcagtgagccgagatcgcgctactgcactccagcctgggtgacagagcaagactccatctcattcataaagaaagaaagaaagaaagaaagaaagcaaaaagaggttcagtgaagagtgttaggactgggaattgacttcaaataacaagcaaacaagaaaccccccagaatcctaacagagaacatccatggatgtcaggaattagtaacaaaagataatttcctttttatttatttatttattttttgggacggaatctcactctgtcccccaggctggagtgcagtggcacgatctcagctcactgcaacctctgccgcctgggttcaagcaattctcctgcctcagcctcccaagtagcggggattacaggtgcctgccaccgcacctggctaatttttgtatgtttagtagagatggggtttcaccatcttgcccaggctggaaaaggataatttcaaacttcctatacatttgaagctttaaaaaaaatttatactgggcacggtggctcatgcctgtaatcatagcactttgggaggctgaggtgggcggatcacgaggtcaggagatcaagaccatcttggctaacacagcgaaacctcatctctactaaaaatacaaaaaacttagctgggcgtggtggcaggcacctgtagtcccagctactcgggaggctgaggcaggagaatggcgtgaacccgggaggcggagcttacagtgagctgagactgcgccactacactccagcctgggcaacagagcaagactctgtctcaaaaaaaaaatgtattatttttcttagagacagggtcttactctattgtccaggctggagtgcagtggcgccatcagagttcactacagcctcaaattcctgggcttaagcaatcctcctgcttcagcctctccagtggctgggatcacaggtacatgccaccatgcccggctaatttttttatttttctttttgtagagacagggtctcgctatgttgccaaggctacacagtgaactttaaatgcacacactaagtaataactaattagaacagaaagataatgaaactgctataaattaaaattgtggaatacagctaaaatagtactcagatggaaaatcaaatccttaaatgcttgcttacattggaaaagataactaaagattaatgagccaatcacttaaaaccgtgggaacaaacattcaaagaaagtagcaggaaagaaataaaggcaacagaaataaaacagaaaaagtgccaaaagaatatgaacaaaacaaagagctagttatttgagatgactgaaaacaagcaaatattttgcaagattggacatagtagtagcaacagaaaaggggcacattacaaacatatggtattttatactatgaatagcaggcatttttataaatgttgatgagcaacttcatggcaaaactgaaaaggtcaattcctagtgtgtgataagacaaaaggtagaatggccgggcatggtggctcatgcctgtaatcccagcactttgggaggccatggtgggcggatcaccagaggtcaggagttcagaccagcatgaccaacatggtgaaaccctgtctctgctaaaaacacaaaaattagctgggtgcagtggtgggcgctggtaatcccagctattcgggaggctgaggcaagagaatcacttgaacccgggaggcggagattacagtgagctgagatcgcgccactgcactccagtctgggtaacaaagcgagactctgcctcaaaaaaaaaaaaaaaaaaaaaagacaagttaacagaagccagatcaaagatggctgactaaggcaagtggaacttaaattttacttgaaggaagttggagccaggtagcaagtgagggttgggcttcaggtgaaaagggtgggcctggcccagggtaagtgctacaggggtggaaaagagggcaaggattagggagagaaggaaaagaggttcactcccaggtttctggtttgggaactgggaggggcctggagaggagcgtggggagaaagtggaaaagtgtagttctgccacatgagtctgaggtgctcctgggacgtccaaaaggaggatgatcagaagcgggttgcatacccaggcctgaggctcactgatgtagtctggatatttgttccttcccgaatctcatgttgaattacaatccccgatgtgggaggtggggcctggtcgggggtgtttggatcatgggggcagatccctcatggcttggtgctgtcttcaggatagcgagttgtcacaagatctggtcatttaaaagtgtgtggcacctccctgctccccaacactccctttctcctgctcctgctctgccacacgagatgcctgctcccccttcacctttcactatgattggaagcttcctgaggtttccccagaagctaagcagatgccagcaccacgcttcctatacagcctgcagaactgtaagccaattaaaccccttttctttattaattaggagggtactctggaggaggtggatggtgtgaagtggaggcaggtgaaagaccgaggagatccttccttcctgcccagggggaaaacgctccccacccatcctcaccagattagccacattatcaggcgtcagcagaggctgcaggaactcagctgtgatgtccgtgtctgactggccggagatctgcgctgaggccttcgaggtccccgacgggcctggctccaagtctttgtcctcatcgtcctcccccaggttgggctctgggatgagggaaaagaacaagatgctggctatagagagagctgcaggccctccatccttccggggtgcccgggtggtccctgcctctagtcagcctcagcaaacaggagcaaacagcggatgaagatccaggctgcagctctgcctctggtgccaaaccactttatgaccctgggcaactacctgactcgttctgaacctcagatctcctgatctgggaaatgggagtaagccacacccctgcagcttatcataagctctaagaagagattattattattactattttttgagacagtcttgctcgtcaccgaggctgcagtacaatggcatgatttcggctcattgtaacctccgcctcccaggttcaagtgattctcctgcctcagcctcccaagtaactgggattataggcatgcgccaccaggcccagctaatttttttgtatttttagtagagatggggtttcaccatgttggccaggctggtctcaaatttctgacctcaggtgatccacctgtctcagcctcccaaagtgctaggattacaggcatgagccaccacgcccagcctggtgcagttttttagaaggcactttggtaatggctatcaagaatgtacactcggtacctaagggcacacctgggctcagaccttgatttctgaaactattccccacttaaaggaaaccagggttccttaaaaagaaagactgattccagggctggggcaaggacagtacaagaggagtctagaacatcttgtcatgctagtaagtaagtgaaatgctcaaaacaaattcctgatagtaagtgggaagaagaagagaaagttcttccttacagcagaatgtcaactgataaatgtagaaggaaaatctctttggagccagtatagaataatagactcaggcaacaatcatcactggatgttaaaaccactgggtgaggctgggcgcagtggctcacacctgtaatcccagcactttgggatcatgaggtcaggagatcgagaccatactggctaacacggtgaaaccccgtctctactaaaaaaaatacaaaaaattagccgggcagatggcgggcacctgtagtcccagctactcgggaggctgaggcaggagaatggtgtgaacccaggaggcggagcttgcagtgagccaagattgcaccactgcactccagcctgggcaacagagcgagactctgtctcaaaacaaaacaaaacaaaacaaaaaaacacaaaaaaaccactgggtgaacgtttaaagagaaacatgtattttacatagtttcaaatatctcccccagcttattactgacaaagataaaaatggcacttgacactagagaaagctggttgaaactgtgttaaccaagcgttcaaaagttaatatctccaacaatgggacaccatgtgcctcctgatcccatgtactgaggcaaccaggggatcacctgaggcgggtggattacctgaggtcaggagtttgagaccagcctggccaacatggtgaaaccctggctctactaaaaatgcaaaaaaattggtcagatatgatggcgcgcaccagtagccccagctactcgggaggctgaggagggagaatctcttaaacctgggaggcggaggttgcagtgagccaagatcaggccactgtactccagcctgggtgacagagcgagactgtctcaaaaaaaaaaaaaaaaaaaaaaaaagacaaatttggtgggtaaaatataactttaaatatacaaaccctggccaggtgcagtggctcacgcctgtaatctcaacactttaggaggcgaaggcaggcagatcacttgaggtcaggagttcaagaccagcctgaccaacatggtgaagccccgtctctactaaaaagacaaaattagctgggcatggtggcacatgcctgtaatcccagctacttgggaggctgaggcaggagaattgcctgaatctgggaggcagagcttgtagtgagccaagatcccaccactgcactccagcctgggcaacaagagtgaaactccatctttaaaaaaaaaaaaacaaacaaatacaaaaattagcccggtgtggtggcattcgcctgtaattccagttactcaggaagcagaggtatgagaattgcttgaacccgggagacagaggctgcagtgagcccagattacaccactgcactccaatctgggcaacagagcaagactgtctcaaaaaaaaaaggatgaggtagatttctataaagaactccaagatgaaagtaaatgaaactaaatgaaaacaaggtacagaatactctgcttagtatacttaattatgaaaaaacatagtaagatccctacctcactccttagataaattccttttttttttttgagacggagtcttgctctgtcacccaggatggagtgcaatggtgcaatcttggctcactgcaaccactgcccccagttcaagcaattcttctgcctcagcctcccaagtagcagcaactacaggtgtgcaccaccacgcctggctaatttttgtatttttagtagagacagggtttcaccatgttagccaggctaatttcgaactcctgacctcaggtgatcccctcaacttggccttccaaaatgctgggattacaggcatgagccactgtgcctggcaattccccccccaccttttttttttttgagacagagtttcactcttgtcacccagactggagtgcaatggcatgatctcggcttactgcaacttctgcctcctgggttcaagtgattctcctgcctcagcctccagagtatctgggattacaggcatgcaccactacacccagctaatttttgtattattagtagagacggggtttttccatgttggccaggctggtgtcaaactcctaacctcaggtgattcacatgccttggcctcccaaagtgctgggattacaggcgtgagccactgcgcccagcctaattccttattttttaaaatgaaaaaataaatctttcgtaaatgctctagaaaaaaagtgtgatttaagaaaaaaatcttaaagttaagaaaagccatagttgacactattgataaataatacaaccactagaaaattacttcagaaagaaaattatctgataactaaaacaaaggaatgaaagaagagctccacactctacataaagcacttctggaggaaaacataaagaagtgttcacacctggggagtggttacttcttgggagagggataagagggatactattttcattttattcctttctgtaaaatttaaataatgcataatttattaaacgtatattttgataattctattgtaatttatatatcatattaaatactgtaatttatttttataattattttataattttttaaaattagagacagggttttgccatgttgcctaggttggtcttgaaccccggcctcaagtgatctgcccgcctcagcttcccaaagtgctgggaatacaggtgtgagccactgtgcctggcccacataacataatctataatataatcttagtaaatacaaattcagcatagtttaaggtaaataatgaaacatttcagcatggtctgcctgccccaccccaccagcccctctcacccagcttcatcttcttgagtgtggagtccgagtcatcgcggggccgcttgcgggtgtccttgctgctcggcatgttgcgggcgatctcggcctgaggtgtgcccaggtccaccagcagggtggtgatctgggcctggaactccaaggaagccgggtgcttcagcacactcaacaggtgcagcttcagattcttacgcacactgctcacctgcgatttggccagcgtcgggggcaggttggctgtgaggaaagtggcaggagctgtgtcttgtggaagatctcatggcatgctgccagtcttaattctcaaccccaaacttgggcagtggtcttgcaggcatctactagaaaagttccttcaccctcagatctaacgtgtggctttccgccttacaagctgatgcttcaaaccctgggggtctccatcagtatcagtcaatcttaaagagaaaaactcaccctctcttttagtaaatacatacaatttcgtcctcctccatctctggtctggaaattcacatatgcttcgcttggggagggttataatcaccacttttgcctccagaaacccccaactgaactgctgcaacagctcactgctagtctccctgacgccaggatgactttctaatggtcaccctgataagtgagcctcccctgttccacagtgaaaaaggatgcctgtaattctgcctgcctagcatccactgccccttcctcagccaacaacacaacccactctccgttaagggagaccccccttctccagtctccttccgagtgggcatgagacctggggccagtgagaataccacattcccttggccactgtaattggctcagagactggctcataatctctgctcagccaatcagaaacaatgaccgtcagcccttggacttctgctggaatggttgggaaggagacactctctttcccatggtgttgctaagtgaacggaatgggagccatgaactatggggggccatctttgctaccctaaggaaagggccagagagtgaaactaaaatggagaaacaaagagctgagagatggagaaatgcagatccacgacctgtacgcattcataccccaaccccagacttctcggttttcgtttcacaaaacagagaaaatggtatgagtctctgtgtacccatcaacatttcgctaatcttggaacatctatcctcccttttggtggggggagaggactggaatatttgaaagtatttcacagacatcatgtcatttcacccccacatacctcaatattaaagccagtcctgaatcaagtttctgtcacatgccaaaagattcctgtctaatgtagagaatctcaggcctgccagatggatgactagcgctcggggtccaccacggagctacatttctttaagaatgagcaggctgaggccgggtgcagtggctcacacctgtaatcccagcactttaggaggccgaggcaggcgaatcacaaggtcaagagatagagatcatcctggccaacacggtgaaaccccgtctctactaaaagtaaacaaattagctgggtgtggtggtgtgtcctgtaatcccagctactcgggaggctgaggcaggagaatcacttgaactggggaggcagaggttgcagtgagccaagattgcaccactgcactccagcctggtgacagagcgagactctgtctcaaaaaaaaaaaaaaaaaaaaaaaaaaaagaaagagcagactggccagtgaagagaaggcagggggaggggggaggacaatgacctaccatgcagagtttcataggcctggatcacctcagacatgaacatgggtctctggcgggcgatattggcaagggagcccagcgctgtggtcaggttgatggaggagatggcagggtgcaccatgaacttaagcagctgctccaaggctgccttgccctcttcccatagcacgtctaagagacagagaggagaaccagtcagtgggatccgttttcccaggcctctggagacagcagcttttgggactaaaaggaaggacagatcctggtacctagatgtctatgaatggcgggaaaaacagaaaatgtggtggttgattagttctatgagactattaatgagtataaaaatttagttataaggggctagacgcagtggctcatgcctgtaatcccagcactttgggaggccaaggcaggcagatcacttgaggtcaggagttcaagaccagcctggccaacatggtaaaaccccgtctctactaaaaatacaagaaattagcccaggtgtgaaggcctgtgcctgtaatcccagctacttgggaggctgaggcaggagaatcgcttgaacccaggaggcagaggttgcagtgagccgagatcgcgccactgcactccagcctgggtgacagagttggactccatattaaaaaaaaaaaaaatttagttataaagatgttcaaagcatgggcttgcaatagtgaaagactagaatacatgtgtatatacacacaactcaaagtcccttgtgacaccactcccctcaatacagtccccaaaattaatgcttaaaactttggtggatatctttccagacctttcctatacagaaacataacgaatgccatatatatgtttttaacttaaaaaattttaatgggtatatagtaggtgtaaataattatggggtacatgagattttgatacaggcatgcaatgcataattatcaccatcagggtaaatggggtctccatcacaagcatttatccgttttgttacacacaatccaattatactatttcaattattttaaaatgtatgattattttttagtatagttaccctgctgtgctatcaaatactggatctttttttttttccctgagatggggtctcactctgtcacccagagtggaaagcagtggcgtgatctcggctcactgcaacctccaccacccagactcaggtgatcctctcaactcagcctcctgagctgctgagaccacaggcacatgccaccatgcttggctatcaaatactagatcttatttgttctaactatttttttgtacccattaaccattcccacttcctccccaaccgcccattacccttttcagcctctggtaaccatcattctaccgtctgtctccatgagttcaattgttttcatttctagctctcacaaataagtgagaacatgcaaagttgtctttcggtgcctggcttatttcacttaatgacttccacttccatccatgttgttgcaaatgacaggatctccttcttttttatggctgaatagtattcaattgtgtatgagtaccacattttctttatctattactctgttgatgaatacttagtttgctccgaagtcttggctattctgactagtgctgcaatgaatatggaagtgcgggttatctttttgatacagtgatttcctttatttcggttacatatccagcagtgggattgctgaatcatatggtagctcaatttttaattttttgaggaacctcaaaactccaaacaatttttaggctgtagtaagtgacattctcaccaacagtgtacaagtgtttccctttctccacatcctcgccagcatttgttgtctttttgataaaagtcactttaactggggtgagacatttcattgtagttttgacttgaacgccacattatttaaaatagtgaattaggccgggcgcggtggctcacgcctgtaatcccagcactttgggaggccgaggtgggcagatcacgaggtcaggagatcaagaccatcctggctaacacagtgaaaccctgtctctactaaaaatacaaaaaattagccgggcgtggtggcgggcacctgtggtcccagctactcgggaggctgaggcaggagaatggcgtgaacacgggaggcggagcatgcagtgagccgagatagcgctactgcactccagcctgggtgaaagagcgagactccgtctcaaaaaataaaagtgaattaaaaatctaaatgaccatcaacagagcattgcttaatagaatgtaatgtaactatactatggaatatggtatagcaactatatgattctcacagggaaggacgtcactgatactattaagtcaaaaaggctgtcaaacaatacataagaatagttaatatttatggaatgtttactattccagccatattaatacaccaaatgctcatacctacatcctaaattagatgccataataacgatccccaatttaccaatgaggaatcaggctcagagacaagggaaaataggctgtgtgtcagacacaagctactataatgtctctgagatgaaaacacaaagcatggcctcatttttgcaaacagaaaagcaaacaaatgcagacactatgcatatacacatacaaatacctacatgtgcacaggaaagatctgaaaggaaacataatactcttaacagtgtttatctctggaaagcaggactgagggaggggacattattccttttgattcacccatattgcttgacaccaagtgtatatatagtactttttttttttttgagacagtctcattctgtcacccaggctggagtgcagtggcacagtctcagctcactgcaacctctgcctcctgggttcaagcgattctcgtgcctcagcctcccaagtagctgggattacaggtgcccgccaccatgcccggctaatttttgtattttcagtagataaggggtttcaccatgttggccagggtggtctcgaactcctgaccccaagtgatctgcctgccttggcctctcaaaatgctgggactataagcatgagccaccacacctggcctatgtcctacttttataatttgcagttaagaaaactgtaaaactgcccggcgcggtggctcaagcccgtaatcccagcactttgggaggccaaggcgggcggatcacaaggtcaggagttcgataccagcttggccaatatggtgaaaccctgcttctactaaaaataatttttaaaaaaattggccaggtatggtggcgggagcctgtagccccagctactttggaggctgaggcagaagaatctcttgaacccggaaggcggaggttgcagtgagctgagattgtgccattgcactccagcctgggcgacagaggaagactccatctcaaaaaaaaaaaaaagaaaaccataaaactagctagcatcgactggctcacactcatggaacttcactacaaacctgtgagagtggtactatgttatcgtctccaatttacaaaaaagaaaatgaagtacagagacaggtaacttgcccaagttcatgatgagtaagcagtgcagctgggatctgaacctagcaccagggatcttaactactgcacacactgttccagaaatttaaaaccaaaaaagacaagggggagagagggaggggcgtgaaggagaggaaactggtgcagggctgtcaggggtggcagctgaaggcagtactcactgtactggatgtaggggtggtcacgagggatgcggtccaggctgatatcatgctcctggcgtcggggtatctctgagtcagccatgcggggtgacagggtgacaatgaggccctccacaaacttgatggcgtgggtgcggatgccgtcattgtcagagtccaatagcaggatgatgtcccccgccatggcagataccatgtcccagcaggcctcctgtagctcgctaatgacccgtgactttaccatccactgccagcaggccaggaaggaatggaagagacacacaaagaggtgaagacaacgcatcaatcaccaacaccctctgccaatacccagagaaccatgaatgatgaatacattcatttggttaacagttactgagttccaactctgccccagcccagtgctcggtgatgctggagacaggactgagtagtggccaggcctcgccctgccctcatggggatgcagagagtgaccactcagtgtgatgaaggcacacatcttcagggtaaaggactaacagtgctgacttcacaaggtggtggtgattaaatggattcattcgttttattaatgctaatgtacatcacaccatagagtgttcttttcctatcacactccataatcaatatttatgtgattcattaattaaggtctacctccctccttgggttatgagcactgtgaaggcagtaagctgtcttggtcactgctgtgtccccagcatcacctagcccagggctaagcacagaggacatactcagggaatgtctgttgagtgaataaacggatggtcaatggaaggaatgaaggttaagtgcaacttcctgacctaggagacaacgttagctctccatgttatctgttcccacagaccagtggcacatcttgcccataaagagtatgctcggatgctggttttgaaccccaacatattagtttgtcaacgagacatatcaggcaggatggccctgggtggggagggcgctctcacctgcagggccaccttgtagagctgggtcatggtgaggatagccttcttcaccacgttcacattctcgtccctcaagagcatgttgaggtttgcaatgagtttcagcagcaactcaatgtctcgcttgctgagggatggagaaaaaaggggcgaggtcaaggtgtggtcttagagcaagtaggaggagcctgaggtccaggagggaagggaaatcagggacctgtctcaggggaccggaatggcacatccagaagctgggaacagtgcttggtgcctccagactgagccgcccctgaaccctctatctagactggtcctgtaacaccaactcctttgctctctcagggccctgctgttcacataagggacagtaggggcagacaactgtgtgaatttggacaagcgacttcacctcatttagaataatagtatctatccaattgtttatgcaattttttgggaaaattgcaacaatacttgtaaagtgcttagaagagtgcctgacatgcagaaagcattcagtaaacaccaaaaagcattcggtaaacaccagccattgctactttaaagcactttgttttctgtaatcactagttttgcttgcctcagtctgagggctcaaaaagtagggaccctttcctagcttggcaataaccccagcagggtcattttcattgaagaaaaaaatgaagggcctccaacaaatgttcaatgaataaataggagctcagcacagaattttcacagcatacattacaatctgaaatattaattaaatcagtcaaaaaatatgaaacttagctgtcagctacatgaaggcaggaataatacgtttttgctcactgctatactacagcctaacatggatgcctggtacgacagcagtcacatggtatgtatttgctgaatggactttttacaaattcagaaaatttaccacaaattctcccagtaaatggggagataggatatttgggttctggcattgcagacatgagttaaaatcccagccttggccaggcgcagtggctcacgcctgtaatcccagcactttgggaggctgaggcaggtgggtcacctgaggtcaggagtttgagaccagcttgaccaacgtggtgaaaccccatctctactaaaaatacaaaattggccgggcatggtggcgggcacctgtaactccagctacttgggaggctgaggcaggagaatcacttgaacctgtgtggtggaggttgcagttagccgagatcgcaccattgcactccagcctgggcaacaagagcgaaactccatctcaaaacaaaaacaaaaacaaaaacaaaaaaaaacaacaacagaaaacaaaattagctgggtgtggtggcaggcacctgtaatcccagatactcgggggggctgagggaggacaatcacttgactcaggaggcagaggttgtagtcagccgagattgcaccactgcaccccagtctggccgacagagtgagattccatctcaaaaaaataataaataaataaaatcccagccttgccacattctggctgtgtgaccttaagaaaattcacttcacctctctgagactgttttctcttcagttaaagggtcaaacaactgatccatagtattacgaataatgaagctgctcaagcatttaatacagtgccttacaaacaaatatttaatacacagtagctagtctacttcctcccagtcacaaagcatccagtaaagctttaataaacaaatgagcaagtgaccagcttgaacaagtcacttgaccattctgagcctgtttccctttctgtaaaaagaggataaccacagtatccatcgaggctgccataattacggagataacacgggaaaggacctgacacagcgcagggcacagtacgtgttccatgtggtgactgttatgttcaactcattcacgtgtgcaacaaatacgtagtcagcccctactaggtgacaacactgctccaggcaggtactggggacaaagtggccagcaagacagaaaaagtcaagccccgtcctcacagagctgatattttgcgggaagaatcaaggttatttcaatgagtgaggaacactgtaaagaacagtgaaggtggggtgcctgagacatggggctgcatgggagcgggcaggaaggaatttctgaggaagagacctgagggaagggaggggagagccaggtggcaacctggggacgagggcccctagcaggaacagcaagcagacaggctgcgaaatccaactgtgacttctgaggagcaggggagacagagaggatcagaagtgagatgaagccgaagtgagagtttgggtttccacctaagtaagctgatgagccagctggggtctgagagcaggggtgtgccaagactgatttacatttaacagcgtcactctggctgctgagtgcaagagtggaagcgggaaatgagtgcggtgattcctctttgggggatgaaatgccctggaacgagattgtgaacgtgctaaatgccactcacttgttcactttaaaatagctgatttttgctgggcgtcgtggctcatgcctgtaatccccgcactttgggaggccaaggtgggccaatcacttgaggtcaggagttcaagactggcctggccaacatggcagaaaccccatctctactaaaaatacaaaaattagccaggcatggtggcacgcacctgtaatcccagctattcaaggaggctgaggcacaagaatctcttgagcctgggaggtggaggttgtaatgagccaagattgcgccactgtactccagcctggacaacagagcaaaactcagtctcaaaaaaaaaaaaaaggccaggcacagtgactcacacctgtaatcccaacactttgggaggccaaggcgggcagatcacctgaggtcaggagtttgagaccagcctggccaacattgcaaaaccccttctctactaaaaatacaaaaataagccggatgtggtggcgcatgcctgtaatcccagctacttgggaggctgaggcaggagaatagcttgaacccggaagtcggaggttgcagtgagccgagattgcgccactgcactcaagcctggacaacagttgagcgagactccgtctcaaaacaaacaaacaaacaaaagattaaaaaaaaaagctaattttgttatatgaatttcaatttaactaaaaagaaaaagaagggagccagagagagaccactgaagtcatcaggtaggaggaaagggtggcttgggcctgcatagtggcagaggaagtgattgacaaacggtcagatgctacagatattctcaaagtggagcccacagtccttagtgataatgtagatgtgaagtgtggaagaagcagaggaatcacagatgaccccagggtttccatcttattaagtatttgctggggaatcagtgtgtatgagagagagaaagggtctgggaagcagagggcaggcctctcagtggtggcctccaggccaggccacgagctgaaggctgccaccagtgagaatgctcccggggctccgtgcctcgccccataccatgcctcctcgatgaagccgatgacaaattttcgcacttcgattgacttgtctgcttggaatgcgatgatctcctgccaatgttagagagaaagtggatcagggctacacaaggatccacatcccctttcccctacaccacacccctttctcttctgtcagtcactcacatccaggaagttgtccagtagtgtggggtctttgttgatgatcagctcctggacctggaaggagattgggggtggggaggaggaatacccatataaaacgaggggccaatcaatgcagacaggagagtagaggggaagacagcagagggctaggcagcagatacactcatttcaatgcctggctctgcttctccctaccaagggtgctatgctctgggcatggtctctgaacctcagtttgctcttctataaaatgagactcttaaacatcaactcaaaagggatgttaggaggctacaatgagatcctacaaggcacaggtcctggtagatagtgaggacatgacacaggagggggctgaaaaaaagaggaaagtgccccaaggctcaggccttcctgaggtttggcctccattcacctgtccatcagttctccccactctccttctgcttctgctccctacttcacattgccatgattcagcaaacatcttcacagtgagaacccaattcctgaagcccttgtgcctgccaggctctttggagtaagcccttcccatggacatcctccaataagcaaagagctggcacaggacctggctgctacaactcaagctactattgctaaacggcctcatgaccacccatgggggaggcaccaggtgcatccactccacctcggaggtggggctactccacaaggctacaggctgatgaaggagccgaacgggttctcacacaggaatgctaaccctgccagtctctgaactccaactgcctcctgctctgaaccatgcccagcccaagtgtcccatgtcgtcttctgcctttgcacacacttctgtgccctcagcttgacatgctctccctctcttggctgggcacggtggctcgtgcctgtaatcccagcagtttgcgggggccaaggagggtggaccacttgagctcacgagtttgagaccagcctggtcaacatggtgaaacgcgtctctactaaaaatacaaaaattagccaggcatggtggcaggtgcctgtaatctcagctactcaagaggctgaggcaggagttgcagtgagagccaggatcgtgccatggcactccagcctgggcaacagagcaagactctgcctcaaaaaaaaaaaaaaaagagatgctctgcctctctcatttggtacacttctctccttttatcctccatggcttggttcaaaagtcctccctgactccccatccctaggctgggtcaggagctccctctgggctcccagagcccccctgggctcccttctccatcccagccctgcccacactgggtcatcattgcctggtgacaggaatgtctgccccactggactggacactggcagagaagaaatgcaatgatgaagagtgtaggatttggagctggaatccaggattcaattactagttcagccagctcccagcagagtgaccctgggctaataatttaagccccggggtctgcttctttctgtataaaacagggatgaaactaccctgccttacagagctttcatgagaactagaagagcagaggcctgcactgagcactgtggccggcacacactgagtgtgtaaatgtggacactggtgttactgcaagtgtctttctcaggttcccagcctcctccctttcacctgctcagcccaggatgccccccgggccctcacctgtttgagcactgtgatctttgagtcattggtgatcagcgccgcctggttcagaagatccaccacctggaaggagggggagtggcaggggatagtgccagcccagtccagcccagtgcagccccctcggcactcccagggctctgccacctaaacagggattgccaaagccaggggctatgcttcctcactccaagccctacccgccacgctcaccctctctgaggtggtcatgccatcgatgcccggcccctcctcttgagtgaaaaactgtgatgccacgctccgacgggtgacgctgtctccactgccgctcgccatggctgctgtcagcttgtccccaggaaagaagaggatggatcaagctcagggaaccagcggatgggctgggctggattgtcacccgaacacctacaaagggcccaagcctccttcccaggctgttcctccccagtcaggccttctcaagtccctctcccctccagggtctgtctctggcttatggatatgtgcacggggcctgtaacttgggggagactgacatctcccaaggcagagccagaagtctcagcctcaagtgggccaaccacaaacagctgctgaacgatgggccacatgaacgtgcaacagccaccttgcaggtctccgtgtgtcccctctctccatctgggatatgctttggactgggcaccacagcaaactttcttttttttttttttttgagatgaagtcttgctctgtcacccaggttggagtgtggtggtgcgatctcagctcactgcaacctctgcctcccaggttcaagtgattctcctgcctcagcctcccaagtaactgggattacgggcacatgccaccatgcccagctaatttttgtattttcagtagagacagggtttcaccatgttggccaggctggtgtcaaactcctgacctcaggtgttccacctgcctcggcctcccaaagtgcagggattacaggcgtgaaccacagtgcctggcccagagtaaacttttaaaaacacagctctgaggaatatcaggcacagagtccggcacatagtaggcactcaatacatcacaaaaggcctgcttcaataattatgtttcagccactctctggaatatcatgaagctgtttttaaaagggaggaagggggctttcaggcatccatcacagtcacacaggcaaaattatggaatgattaacgtagcagtatatgtcaattacacaactattcataatagcaaaagactagaagcaactcaagtgttctcaaatagggagactggctgaaaaaaagttcatacataatcaaaggccatggggcttcaacacctgtgaaagtaagtgaaaaacatataaatataaataaaggaaaaagactatggaactgtaacaagaaaggaagaaaaaaacaaaaaaatgagaacaatctctagacactgatagagagtgcatacattaagtgaaaacaagcaaagctgaagacagtgttgactgtatgtttctgttttacaaaaaaaaaagaaaaatgaggccaggtgcagtggctcatgcctgtactcccaacactttgggaggctgaggcaggcagatcgcttgagcctaggagtcggagagcagcctgggcaacatggtgtaaccctatctctacagaaaatataaaaattagctgggcatggtggcgtgcctggtagtcccagctactcagggaggtgaaggcagaggctgtagtgagccaagatcgggccactgccctccagcctgggcagcagagtgagaacttgactcaaaaaaaagaaaggggaaaaaatatatatgttaaaaaaggaaaaaaatctgaaaggataaaccaaaaaccagcagaggaaacagggtaaaaaaaattggtgaagccgggcgcggtggctcacgcctgtaatcccaacactttgggaggccgaaacgggtggatcgtctgaggttaggagtttgagaccagcctggccaacatggtgaaaccccatctctagtaaaaatacaacagttagctgagcctataatcccagctactcaggaggctgaggcagaagaatcgcttgaacccaggaggcggaggttgcagtgagccgagatcatgccactgcactccagtctgggacataaagacagactccatctcaaaaaaaaaaggtgaatctcagtatattatcctgaaaagaggtccctgacagcctgttgcatcagaggacaatacatgcagttcaagccatttttgtcaagtatgtgtttatgtatacgcagaatgacctgaggcaagacatttaacttctctggctctcagtttcctcttctaggaaacagggatagtaacagggcttacctcccaagactattttgaggattaaatgagttagtatatacagtaaacattggctaagtatactattatttttatgtacatgggaaaagatctgaaggctactgcataaactgctaacaacaattatgataattaataataatttggccagctcacgcctgtaatcccaggattttgggaggctaaggtgggaggatcaattgagctcaggaggtggaggatgcagtgagctgtgatccctaccactgcattccagcctgcggacagagcaacaccctgtctcagaaacaaacaggccaggtgcagtggctcacatctgtaatcccagcaccttgggaggctgaggtaggcagaacacctgaggtcaggagttcgagaccagactggccaacatggagaaacactgttccctactaaaaacatacaaattagacaggcatggtggcgcatacctataatcccacctacttgggaggctgaggtgggagaatcacttgaacctgggaggcagaggctgcagtgagctgagatcacgccactgcactccagcctggacgagaatgagactgtcttaaaaacaaaacaaggctgggtgcggtggctcacacgtgtaatcccagcactttgggaggccaaggcggacggatcacggaggtcaggagatcgagaccatcctggctaacaaggtgaaaccccgtctcttctaaaaatacaaaaaaatatgccgggcatggtggcgggcgcctgtattcccagctactcgggaggctgaggcaggagaatggcatgaacccgggaagcggaacttgcagtgagctgagatcacaacactgtactcgagcctgggcgacagagtgagactctgtctcaaaaaaaaaaaaaaaaaaaaaaaaacacacactaaacaaacaaacatgccaaaaaaacaataatctgaggacggtgaaaatgatacttttttctttttttgagatggagtcttgcactgtcgcccaggctggagtgcagtggcgtgatcgtggctcactgcaagctccgcctcctgggttcacaccattctcctgcctcagcctccccagtagctgggactacaggcgcctgccaccacgcccggctaattttttgtatttttagtagagacggggtttcaccatgttagccaggatggtctcgatctcctgacctcgtgatccgcccgccttggcctcccaaagtgctgggattacaggcgtgagccaccgcaaccagccgaaaatacttttttttttttttttttagatggaatttcactcttgtttcccaggctggagtgtaatggcacaatctcagctcaccgcaacctccaccctcccaggttcaagcaattctcctgcctcatctcccaagtagctgggattacaggtatgtgccaccacatccagctaatttttgtatttttagtagagacgaagttttaccatgttggtcaggctggtctcgaactcctgacctcaggtgatctgcccaccttggcctcccaaattgctgggattacaggtgtgagccacagcgcccagccgaaaatgacacgttttttaaaaggaactacccaatagctattcacagtagtatcacatgataggggtctcctcaatgaatgacgagccacagcctcctccctagtttccctgctgcctgtcaccccctatcttgctcagggtcagggccaatgtccccatcaaggcctacaagattttatggcatctggcctgttcttcctctgactgcctctccccctgggctctttgctccacccactctggcctcctcgctgtcctgtgaacatgcccaacatgccccttcctcaaagactttgtgcctctcttccgtctgcctggaatattcctcctcctagatatcagcacaactccttccctcttcatttccttcaggtctccactcacatgtctctgcagtaaggtcttccctgacgactatgtttcttttttttttgagacggagtttccctcttattgcccaggctggagtgcaatggcgtgatctcagctcacagcaacctctgcctcccaagttcaagcgattctcctgcctcagcctccctagtagctgggattacaggcatgtgccaccacgcctggctaattttgtatttttagtagagacggggtttctccatgttggtcaggctgatctcgaactcccgacctcaggtgattcgcccgccttggcctcccaaagtgctgggattacaggcatgagccaccgcgcccggccgacgaccatatttcaaattttaacttcctctcgatccccatctgtgttgctttttctccatagcatttatcatcatcacacactacatatttataagttccacgaggacagtgatttatttatttgaaatcattttttggtagaagcagagtttcgccatgttgcccaggctggtcttgaactcctgcactcaagcaatccaccctccttggcctcccaaagtgcttgggatcacaagtctcagccatcgcccccggcctagaacagggattttgttccttcactttttatattcccagcacggaagagtgcttggcacctagcaggagctcaataaacatctgctgaatgagtgaacactactgccaaacggcctccccaatcactgggttcagtattcctgccctttcactcttgaatcctaatagctatacttgttctactttttccccctttctcactactgcacttgacaagtctttaaaaaaaaaaaaaaaaaagggcatggtgtggtggctcactcctgtaatcccagcactttgggaggccaaagtggacagatcacttgaggccaggagttcaagaccagcctggccaacatggcaaaacccagtctctgctaaaaatacaaaaaaattacttgggcatggagatggatgcctgtaatcccagctacttgggaggctgaggcatgagaattacctgagcctgggaggcagacgttgcagcgagccgagattgcgccactgcactccagcctggatgacagagcaagactctgtctcaaaaataaaacaaaacaaaaacaaagaaaggaaagaaaacaaaaataggacgggtatagtggctcacaattgtaaacccagcattttggtaggtctaggtgggaggatggcttgaggccaggagttcaggactagcctaggcctaaaaactaaaaaagaaggccaggtgcaggggttcatgcctataatcccaacattttgggaggctgaagcaggaagagtacttgaggccaggagtttgaaaccagcctgggcaacacagcgacacaccatctctagacatatgcacaattagctgggcatcgatatcatgccactgctctccagcctgggagacacggtaagactccatctaaaaaaaaaaaaaaaaaaaaaaaaaaattagccaggcatggtgccatgaacctttagtcccagctactctggaggctaaggtgggaggattgtttgagcctggttgtagtgaagtatgattgggccaccgtagtccaacctgggcaacagagcatgaacctgatgaacctgtttccaaaaaaaaaaaagaaaaaataatcagttaatatatattgaacacggccgggcacggtggctcaagcctataatgccagcactttgggaggccaaggcgggtggatcacccgaggttagcagtttgagaccagtctggccaacatggtgaaacctcatctctactaaaaatacaaaaaaattagccaggcatggtggcaggcacatgtaatcctagctactcgggaggctgaggcaggagaatcgcttgaatttgggaggaggaggttgcagtgagccgaggtcacatcattgcactccagcgtgggcaacaagagtgaaactgcgtttcaaattaaaaaaaaaaagaaaaaaaacccacacacacagagagagaaagagaaagagagagagagaacacttaatatgtgctaagcacaattctaagatatacatattaactcatttaaacctcagacaccaaggtttaaatgaattaatatgtatatattagaattaatatacatgagttaggtttacattttttgtttttttgagacagggtgtcactctgttgcccaagctggagtgcagtgccgcaatctcagctcaccgcaatctctgcctcccgggctcaggcgatcctcctacctcattttcccaagtagctgagactacaggcgaatccccatttaatttttgtactttctgtagagaagggtttcgccatgttgcccaggctgggagttagtatttttaattttcattttacagatgaggaaactgaagaccagggaggtaaagtgacctgaccaaaggcatatagcttgtaagaggcagagtcagcagcatggctgcatatcttccttaccactatgctacagtactgtttatctgaaaggaattgttttttacccccaggtctgtttacgtaagccaaggatcctggccaccagacaaccggcatggcatgccgtccccagtcaaaacataaaaaaaacaggccgggcatggtggctcacacctgtaatcccaacaccactgcactccagcctgggcgacagaatgagactctgcctcaaaaaataaaataaaataaaataaaaccccataataaacatttccacttttttcatgataatacattcagatcaaccaaaatattttaccctgtttcattcttcttctgctttttggtttatgctttcagttttgttttgttcttttttaaacacacatacacaaaattctcctgcaggagctagattttatgcaaaaaaaggaaaaaaaatgaaaataaaaaaacccatatatacatatttccctttcatttacaaaaagagcatacacagggccgggagcggtgactcacgcctgtaatcccagcacttcgggaggcggaggcaggtggatcacgaggtcaggagttcaagaccagcctgaccaacatggtgaaaccccatctctactaaaaatacaaaaattagccaggcgtggtggtgtgcctgtaatcccagctacctgggaggctgaggcaggcgaattgcttgaacctggaaggcagaggttgcagtgagccgagatcacgccactgcactccagcctgggtgacagagtgagactctgtctcaaaaaaaaaaaaaaggagcctacacaggccgagtttggtggctcaggcctgtaatccctgcactttggaaggctgaggtgggcagatcacttgaggtcaggagttcaagaccagcctggccaacacagagaaaccccgtctctactaaaaatataaaaattacctgggtgtggtggggcacgtttgtaatcccagctactcgagaggctggggtgggagaatcacttgaaccagggaggtggaggttgcagtgaactgggatcgtgccagcctgggcgacagagtgagaccctgtctcaaaaaaaaaaaaaaagaaaaagcatatacaataaacaccaacctccacttcacttgttttcccttaatatatgttggaggccactatatcagtgtatagagattttcatcatttccttttatctacctcattcctttttagagttgcatagtattttttatgtggatgtattatagtttctttcagccaatcttcttatttaagaacatttgggatgcgtgtagccttttgctatgatgaacagtatcactgtttccccttccctctcgatgtactcgttaagaagtggtaccctgccccactgctacctaggaatctgatgactaccctgtttccccaaactggctctaggagtatcttttattccttcaacgaacattagctgggcgtctccggcgtgattggcgctgtgctgagaacacagtggcgacagagacaaacctagtccctaccttcatggaacacacggtcatagacatcataaaacagcacacagataagagtcggataacaaattagaccacacgtgacatgaaggaacacggaccgacaaaagcatttaacaggcggatttctggatggagggcagggaaggagggcttcgcagaggaagtgacgttggtgccgagacccgaaggatgaaatgggagttagccaagccgaatgggtaaaaggatgttgcaggcagaagggacagcctgtgcaaaatccccgaagcgggaaagcgcatggcaagtttaaggaaccgaaaggccagggcggctgttagaggtgggggaaaaagcaaagaggccgagtcgaagcaagcgaggtctgcggggcggtggcgcccggggggccacgttggaactttgcctcgagggcactagggagccaaggaagggtcctgagcaagggaagaaacatgggtcgcgaaagccactgttcccctctccccacggcgatgccctccccgcccgagcccctgcttctttaggagcctcctcctttcgtctccgggcccaaacgccgcctcccgctcaccgcagctctggcctccgttcccctcgcgccccctcagcagtgcctcttcctacactccgccgccgccgccgccgccatcttccgttcgtcgccgggaacggtgcgcacgcgccacacacccagggccgccgggaaatggagtccagagcacagcccgaccccgcccatgcctcgtcccgtgcgagcggcattctgcccgcctccatactacggcgagcagacccttcatttccggctctgggtccggctaggccttctgggaaatgtagtcccttcggaggcaccgggcggaaagggagctagagcattctgggaaatggagttctcagtggtgctgagtccctggacggctggctggtcttggagagtgcggagttcgggcagcgaagctcctgggtcttggaggggaggtggtctgttgccctagtggggtctgcggagaggccccgatcccctccatctttgttcttgaccctttcaacagtctgaagcatttctttttcttttcttttctttctttctttttttttggaaacggagtcccgctctctctcccaggctggactgcagtggcgcgatctcggctcactgcaacctccgcttcctaggttcaaacgattctcctgcctcagcctcccgaatagctgggataacaggcacgcaccatcacgcctagctagttgttgtatttttaatagagatggggtttcaccctgttggccaggctggtctcaaactcctgacctcaagtgattcgtccgcccgcctcggcctcctgcagtgctggaattacaggcgtgagccaccgcgcccggccaagttaagcatttctagccgtcggaagcctcagtcttcctgtctgtccaatggggatgtgatttcggggaccttttacgggtccttgtagtcgcatagtggccctagcgttctgattcccctttcttccgccacggtcatgcagggctctggctcttcgtcctctcctgccgagatgatgaagccccctgaggtagaaaggctccagagttctgacctcggggcccttggtatctgcagcgtcgctgcgggcagctccctcactcctgaatcacccccagctgtcgcgtcctggggctgcggcccccggcgcctgaggtctgtctcctggcgatcccgcagggggcgccccagtccgagcgcgccgccctcggggaggcgggaggggagcccggggcgggcgagggcgggggtgtcccggctataaagcgtggccgcctcccgcggcgctcgggacagccgtaccccgggcggtcggacgggcgggcgccggtgggagctcgggccgtgcccgctgagagatccagagcgctccgttcccccggggccggagcgggggcgggtgggggcgtaagcccgggggatgctgggctcagtgaagatggaggcccatgacctggccgagtggagctactacccggaggcgggcgaggtgtgtcctcggggatggcggagcgggaagttgggggcaggtatcggggtgtgggctcacatggagcagggactggttgtgggttcaaatggaggcaaaggcgtctacttgggcagctgaggaactgggaacacggagaccaggtgtggaagtcggggaccggggacgaggcatggatgggagcgctgtttgggcagcctcgccgcggccagggcttaaaaatggaagtcaggaaaatttagccaagggtcgggtcacaccttaaacttgggagccgggtgttggagccccaaaaagcaagggatttatatgtacaaaccaaagataggaatcagagttccagggtaggggacagactagggggtttcaggatgtgaggttcaaagttggagggaaagaaagactaaaagatggaggaggagtcaccattaaggggaagactgaggtgggagctcagggccagcacacagtgttaaagaaccggggttcggggctaaggatcagctggtaatctaaggtagggtcagacatagggattggtgctcaggggtcagagatgggggtgctcagagatgaagcttcgtttttggagtctgaaataacaggtggcttagagttgggcatctgggagcagaagatgtagccatcagcattggcaggagaggggccgatctccacccccccatccctacccatgaccctccgcagggactccccaagtcggaagatggagagttttagattgtgcaccttcccctgctccccgccagtccagcaacctccagctattgctaaaattcccatccagtctcacctcagacaaggcttccctggagtggggggtggcggcatattctaatcccctcacctggacagacagaaagtccttcctcaagtctgacccccattcgtcttgctgcaacgacccctacaccttagctacctcactctgtaatcaacgttgtgaggttgttggggctgggggttgggttcttggtctgagaattatgggggtctggacacttggacttctaacctggaaggggactgtgggcttgaggtggggtgtggggcaggaatggctaggttctccaaggagtcaagatctggtgactgcgggggccccagtgtgcctgagtcttgggtctggggctcgaaactgtagggtgggactcctggatccccaggccttcagggctgggcaaggtgcctgggaagggccagtcctgggtttggggaggtgtgaggtgcacgtggggtggggcagggccaacagggaaagggactgggagtgttgagaggtggaggcagggtggctggaggtatcagttgtgagatgcggaaggcagagacccaggtgggaaatggagggttccaggtagtgggggtgatcccagctggacctctgcagaactcagtctggggacctgatttaagggaaccacctacagaccaattgtacaaaccaactacagttgttttgggggcacatcttaagtaaatgatgggggtctaggcaggaggagttgatatttggggcacagtctgaatagatccaagtttaggggacaatttgtatggaaattgtgtcagaaattgaaggaaagccggcacagtggctcacacttgtaatcccagcactttgggaggtcgaagtgggaggatctcttgagcccaggagtttgaggccagcctgggcaacatagggagaccttgtctttaaaaaaaaaatttttttttaattagtcaggcatgcctgtagtctaagctacttggttgggaggctgaggtgggaggatcacttgaggctgggagttcgagctgccgggagctgtgatcgtatcacggcactccagcctgggtgacagaatgagaccctatctcaaaaaataataatagtagagggacagtctggaggtaatcagcatttcagggcatattttgggagagtcagtatttggaggaatggaaatggttgggtgatactgtctgaggctctccccagccttcccatcagataagcccacctcttccccttgggtcagaacaatggggagagaaatacctacactcagccagcaactgagagctgagagggtccccaaaccacttcttgcccatagcaccctcccgcttggggtgacgttaacactcagggcagcttgctgtctggaaagaacttggaaagttaccatcctgggatatccctgttggcctcaggttcttgcagatcagctggtccagctgctcccctgttttagaggtggttaactctgaagccccgcacgcagaacactggggtcctgggttgggtctgggactagaaacttggcttctggcttcacactgccttcctctgctccctgtcacacccttctccagagacaataaggaaatgaaagaggagaaattccagtctcctggtgtgggggtgcgggtcccccaagggcttccccccaatctcagccccaccctgtcaggggagatccggctcagacccggacaccaggggttcatcccagccccggggcgtgggaaagcctagggtggattagggcagctggagtgcttgaggtcggacctcaaggaggacttccgggtgggtggggagccagaaaggagggccctggggtccctgtctgtcttactctgcaataccagagagcctgactgggttgcagaaatggggggtggaggtatagggggatttggaaactctgtggacccctctaatccatcaccttctcacctcatcccttttctttttctggggaggggacccgaagccaccaaccagcgggagagcctgcatgggggaagggagtaactgtggctgcaatttcactgtaagacttggggtgagggggaatggatttgttgaagggagggagatagatagatagatagatagatagatagatagatagatagatgcatggatggatggatagatagattgataggaagatggtggctcgtcatggtagctcatgactgtaatcccagcactttgggaggccgaagagggtggatcacttgaggtcaggagttcaagaccaggctggccaacatggtgaaaccccatctctactaaaaatacaaaacttagctgggcatggtggtgcatgcctataatcccagttacttgggaggctgagacaggagaattgcttgaacccaggaggcggaggttgcagtgagccgagatggagccactgcactccagcctgggtgacagagtgagactctatctcaaaaaaaaaaaaaaaaaaagacaagaagatgggctgaaggaggaagaaaggtgggagttggggttgggaggggagtggggtagagtcggatagtgagagagagtgcccaggaagggagaaagagatggaaggatggagagagagacaggggccgagatggaggggaaagaaagatgggagaggactcgggaggggtcgagggtgggcaggaagagcaaaagaggttagggtggagacagaagggaaaacaatgcgggggtggggagggagatgggagaggggaatatgggtactagtactgagacgggtaacacaacggcaaaaatagccaacagagattcaaagagacatgatgaaagagttccttggagagacatgaaaaggaaagagcagaggatttctcgactggaactcagacttagggttgagttggttgcctccactctctgattccctaagccaccctggccagactcgtttctccggaccttgtgacctgcagaagcttacagtggtagggccagacatggtggctcatggctataatcccaacactttgggaggccgaggcaggaggatcacctgaggtcaggagttcgagactagcctgaccaacatggtgaaaccctgtctttactaaaaatacaaaaactagctgagtgttgtggtgcgtgcccgtaatcccagctgctcgggaggctgaggcaggagaatcgcttgaacctgggaggcagaagttgcagtgagctgagattgcaccactgcactccagcctgggcgatacagtgagactctcttaaaaaaaaaaaaaaaaaaaagcttacagtggcaggagactaggcggtatccagttaactcacatttggtggctctagccagtgctgtatatagcagcattcccccacccacgcagtgccatgagaccccaggcctcggaggaggcagtggggaaaggtccaggtggagaatggggcagagaggatgggagacagtggttgagaagggataagtagatacaaagaaagaaacaaccttccagcatgcctatgttttcctggcgtgttctgttcactgttgtgttcctgctagactgttggcaccacgagggcaggcatttctgtctgtcttagtcactgcttttattttattttatgattattattttttgagatggagtcttgctctgttgcccaggctggaggcagtggcacgatcttggctcaccacaacctctgcctcctgggttcaagcaattctcctgcctcagcctccctagtagctgggattgcaggcatgtgccaccatgcccggctaattttgtatttttagtggagacggggtttctccctgttggtcaggctggtctcgaactcccgacctcaagcgatccgcacccccaccccccccacctcagcctcccaaagtgctgggattacaggcgtgagccaccgcaactggcctagtcactgcgtttatagcgtgacccggaacaggtctggagccagactgcctggttgcagaatcccagttctgcccccattcttgctgtgtgaccccagcaacctctctgggcctcagctagctcagctgtaaaatgggcatcatcataacacctcctcccatagtatggttgtcaagattaaaggagaccattcttgtgaagtgcttggagcagctaactgataaatattggttgaatgaatgaaagaatatacagagggttacttaggaggcactgcaagatctaccgtgttccattgacctaggatgcaccttttccccccatttgaacatttccaaaaatgggatgcattttacagtcaacagtgtcctatgattttaactgagtgtttttcccatttgtattaatatataaagtaatgctgcagcttccagagaagtcttagatttgaagatatatagtaaatggataatattattaggttgaaaagtgatttctgatattcaaacacttttatgtataaatacagtaatttatttttatttatttattttttttttttgagacagagtcttgctctgtcgcccaggctggagggcagtggtgcaatctcggctcactgcaacctccaccttctgggtgcaagcaattctcctgcctcagcctcctgaatagctgggactacaggcgcccgccaccatacctggctattttttgtgtttttagtagagacagggttttgccatgttggccaggctggtctcgaactcctgacctcaagtgatccacctgcctcggcctcccaaagtgctgggattacaggtgtgagccactgtgcccagcctaaatgcagtaattttataagctaaaagattgaagagagctacacatatatgttagatatgttagattattacagagttataataactttttttttttttttttgagacagaatctcactgtcgcccaggctggagtgcagtggcatgatctcagctcactgcaagctccaccttccgggttcacgccattctcctgcctcagcctcccaagtagctgggactacaggcgttcgccaccacacccggctaattttgtttttgtatttttagtagagacagggtttcaccgtgttagccaagatggtctcgatctcctgaccttgtgatccacctgcctcggcctcccaaagtgctgggattacaggtgtgagccaccgtgcccggcctataataactctttatgattactaaaattgagaactgctgatttacctaataaaccagcagttattaaatgttttggtctcaggaccaccccccttcttttttttttttttttgagatggagtcttgctctgttgtcctggctggagtgtgcagtggcatgatctcagctcaccgcagcctcagactcctgggctcaagcgatcctcctgcctcaacctcccgagtagctgggattacagtcctgtgccacgatgccggctgatttttgtatttttggtagataacagggttttgccacgttgccaggctggtcttgaacttctgacctcaagtgattcaccctccttggctcccaaagttctgggattactttgggaggctgaggcaggaggattactcgaggccaggagtttgaaaacagcctgggcaacatggtgaatccccgtctctactaaaaatacaaaaaaattagctgggtgtgcggtgcatgcctataatcccagctacttgggaggctgaggcaggaggatcacttgagccccagagtttgaggctacagtgagctgcgattgcaccactgcacttcagcctgagtgacagagtgagaccctgtagaaaaaaaaaattatttaggagtccaaacagtttctgttgatgtgggttatgtctatctacgtttacagtatttacaattaaaactgagaaatattacaaacatgtattcatttaaaaatagcaatcatttgttagtgtaaaagatttttattaaaaaaaccaaatttcaaaaaatttagtcaaaagagcgacactgtttttttccatttttgcaaatcaagtctggcccagtggaagacagctggattctcctggttgcttcttcattctctctgttggaatatcaacaccccctggaaaactccactgtacacttcatgagaaagagagtgaaaagggctaataataacttaggattgcgggtgtggtggctcatgcctgtaatctcagcactttgggaggccgaggcgggcagatcacgaggtcaggagttcaagaccagcccggccaacatggagaaaccctgtctctactaaaaatacaaaaaaaaaaaaaaaaaagctggcgtggtggcacacacctgtaatcccagctgctctggaggctgatgcaggagaattggttgagcccaggaggcggaggttgcattgaggtgagatcacgccactgcactccagcctgggcgacagagcaagactctgcctcgaaaaaaaaaatagcattattttgaaaatagttttgacttcgtggacatcctcaaagggtttcagagactgccctgggagtcccgaaccctggagaatcacttaaaggatgatgttgagtgtatgggagcatggtgggtgggaaagcagggggcagaaagggcgtgtccagggagtgaggagagaccttgagagactgctttctacagatagaggtaatgatggaagggatttgtagagaaggcaagatggacagacagacggacactcagtgggtcctgggatcctttgctgaccagcagagtggagccccactgacccctcctttcatctttcccctaggtctactcgccggtgaccccagtgcccaccatggcccccctcaactcctacatgaccctgaatcctctaagctctccctatccccctggggggctccctgcctccccactgccctcaggacccctggcacccccagcacctgcagcccccctggggcccactttcccaggcctgggtgtcagcggtggcagcagcagctccgggtacggggccccgggtcctgggctggtgcacgggaaggagatgccgaaggggtatcggcggcccctggcacacgccaagccaccgtattcctatatctcactcatcaccatggccatccagcaggcgccgggcaagatgctgaccttgagtgaaatctaccagtggatcatggacctcttcccttactaccgggagaatcagcagcgctggcagaactccattcgccactcgctgtctttcaacgactgcttcgtcaaggtggcgcgttccccagacaagcctggcaagggctcctactgggccctacaccccagctcagggaacatgtttgagaatggctgctacctgcgccgccagaaacgcttcaagctggaggagaaggtgaaaaaagggggcagcggggctgccaccaccaccaggaacgggacagggtctgctgcctcgaccaccacccccgcggccacagtcacctccccgccccagcccccgcctccagcccctgagcctgaggcccagggcggggaagatgtgggggctctggactgtggctcacccgcttcctccacaccctatttcactggcctggagctcccaggggagctgaagctggacgcgccctacaacttcaaccaccctttctccatcaacaacctaatgtcagaacagacaccagcacctcccaaactggacgtggggtttgggggctacggggctgaaggtggggagcctggagtctactaccagggcctctattcccgctctttgcttaatgcatcctagcaggggttgggaacatggtggtgggtatggctggagctcacaccacgaagctcttggggcctgatccttctggtgacacttcacttgtcccattggttaacatctgggtgggtctattacttactgtgatgactgctgtctcagtgggcatggtgttgatccacggggtactgtgataaccaccatggatacattttggtggcccactgggtactgtgaggactgctacattgatggatgttattggctaatccactgcatggtttgatggccaccatctcggttggccctttgggtgtgatggtgatagcatttcagtgacatcttctttggccccccccattaggtgctgtgcccacttcttttttggtgtacttggcacagtaggtgccaagttggccaccattctgtgtaacaccttttttggcccattgggtgctttgatggacatcatactgggtaggtgacaacgtcagtgggccaccatgtgccatgatggctgctgcagccccgtgttggccatgtcgtcaccattctctctggcatgggttgggtaggggatggaggtgagaatactccttggttttctctgaagcccaccctttcccccaactctggtccaggagaaaccagaaaaggctggttagggtgtggggaatttctactgaagtctgattctttcccgggaagcggggtactggctgtgtttaatcattaaaggtaccgtgtccgcctcttactgaatgtctcttttccttggccagtgggccctgtggggcttgaacacctgaatttctgctcctctgtcccttctgcttcctgcccctaagagctggctgcctctgggggaggagttgggggaggcatcgacctgacctttggctctttgctgtccctgaccccaaggacagtttgctcacagatagcagcccccgcagcagtggggccagagcagcagggggaggtggctctgcagtgaccaaggccatctccccacccccacttctcagacatacacacagacctctacctctgaggctctgcaagcctaatggccgaataatctttggctaagctggggaggaggaaaaaggacagatgaggtgtcaattcaatgactggagatcgtgcacatgttggagtttatctgcgtgtgtgtgtgtgtgtgtgtgtgtgtgtgtgtgtcctctgtgtgtcataggatagcactatgcctattggggtcctcatggtctaccgcagggtgttgtctgttgtcagtatcccttgattgtgtaggtttttgtgtctgttcataccctgggtatatgcttacttgccctgggtggctgggaatatcagactcttgtgtatgtttttttttgtttttttgagacagggtctcgctctgttgcccaggctggagtgtgtggcacaatcttggctcacggcaacctccacctcctgggttcaagtaattctcttgcctcagcctcctgagtagctaggattacaggtgcccgccacgacacctggctaatttttgtatttttagtagagacagggtttcaccatgttgaccaagctggtctcaaattcctgacctcaagtgatccgcccacctcaggctcccaaagtgctgggtttacaggcgtgagccactgtgccctgccttttgtgtatgtctttattgtgttgtgtgtgtggttctctgtgtacacttatccctgggtctctctgggtctcacactgtgttacgtgtgtgtctatatgccattctctacctaactcactgcctcagagagtgcgtgtgtggaacgagatgcatatggcagggctggctgttcttgtgtgttctatgtgtgtctctgtgagtccgtgtatgtctgcatgcttaaaagaaaacatgtagtctgggtgtggcggcttatgcctgtaaccccagcactttgggaggtcgaggtgggcggatcacttgaggtcaggagttcgagaccagcctggccaacatggcgaagttggcctaaaaatactctattaaaacacaataattaagccgggcatggtggctcacacctgtagtcccagctactcaggaggctgaggcaggagaattgcttgaacccaggaggcagaggttgcaatgagccgaaggttgcagtgagccgagattgcactgctgcactccagcctgggcgacagagcaagactgtctcaaagaaaaaaaaaaaaagaagaaagcatgtgtgtttgtgtgtgtctggtggctacctttgctgtgtacttgtcactgttgcatttgcatctgaacgtgtgtggagagtaggctggcctggtgtctgtcacttttgcaggagagtgtgcggggaaggaaccgtgtcctccttcagccactgtgagcctctgggtttgggatctgtgtttctgtcccccaggtctctcctgtgactctgagtctgcctgtctgttgctcagattggctgtcccagaaacacaactgtgcacctcccacctctcctttcagaatggaaactgaggcccagatgggatgggactgggctaaggtcattcagcggggctggagtgagtgggcaaggttgatctgattctgtcttttccttacctgtcatctgcctttcctggttgctggctctctggttgctcattcatttattcagtcagccagccagccattcagtcatttgaagaccaaagactttgtctaatccacgtgtgtgtgtgtgtgtgtgtgtgtgtgtgtgtgtgtatgagcgcacacgtgcatgcatgcacaccagtgtgacgtgtctttcagtttctgtgggtccatctttttccttgtctcttagtgtccttttttcctctttttctttccctccctcccttccttccttcttccctcttttcttttcttttctttttttttttttttttgacagggtcttgctctatcacccatgctggagtgcagtggcgcaatcacagctcactgcagcgtcgacctcctgggctcaagctatcctccctcctcagcctctcgagtagctaggactacaggtatgcacccccacgcctggctaattttttaatgttttatagagaaggggtctccctgtgttgcccatgctattcttgaactcctggcctcaagcaatcctcccgcctcagcctcccaaagtgctgagattatagacatgagccactgcgcctgaccagtgtcatttctttctgtatcaatctgtccctcaccctctttctgtgcctttatctgtgtttcttggtttgagttgctggtgctgtctgtgtgtgtctgtctctcctatggctcacctcatgctctctctctctctcccccctcgctcacccggcccccgccttttctctctactgctctgacttccctcctccctccacctgggtctctgggtttctccctccttctctcagagtgactctttcctggggtccgtctccccccactcctttcctggatctctggtctctctttctctggcctccatccctctcccagctctctgggtttccgcctctacctgccacctcgcaggccaggccctctattcctgtcgctgcgccccgccttgccggctgcgtgtcacccccgccccctgccgcgctggctccccgtccgtcccaccagccttgctgtcctgggcaggccggggaattcctcccggttcctggaaaaaacaactggggccgagagaaaggccctcagtctccccaggcacccgcccccctccctcgggcctgggggtctctcccggagtcggccagcccgaggcaggaagccctgcggtttctggcttctcccaggcggcctccggatctggcccccgccccccggccaacagcccaaatattattccgcgggaggagtcggtggtggcgggaggaggcccaggctgaaagaggctttcagggcggccaggcctggggcttcctgtccccaggctcgggcctcaggccgccccagtggggacctcaggtggccggaggggcggggtgttgttgtagggtcctcgggggagggtggggccatccgtcggggtgtctggtggccaccagctctgctggcgtgggcaggtgtgacccccaccccagggacagccggctgatgtccagcgtggaaaagtaccacggtcagacatgggacgcatggacagacacgggacgccacgaatcagggatgtggggtggccatggggacacaggcggccctgggctgtgggcctaaggtgacatggtccaggggaggggcctgtgggttggagcagaggccggggcagggtcgcagctgtgggcagagggctgtcagcattaggaggtaccagatgatgatgatgatgatggtgatgatggtgatgatgataattaaaagatcctagggcttcccatgagtcagggattgtgttagcaccttacagaactgatgggctccatctctcccgctccccccaactttactgttgaatgaaactgaggcacagagaggtgaagtaacttgcacagataatgagtggggtgctagggcatgaacccaggcagtctgggcccagagtcagtgcctctaagcaccccgctgttctgcaggatgggagggatagcggcagtgcagcacagtcctggggtcccaagccctccctggcaggcaccccccctctctgccacagcctgccatatggcaggaggtgggttcccagaagccacatactcactggtgaccaggcggttcacagctaggtaggacatgtgtgtctaagcggtttgtcattgggctttattcgcgtgtcttgctgtcagcgtctcaatgtcactgtgtctgtgggctcgtgtgttactccatggtgtgtctctgttgagcgcatgagtgtgtgtgcctggacacctctatgttggtgtccattgctgggtttgtgttggtgtcactgactgtctcaccgtgtacacgtgtaggtgactgttctgtcattgtcttctttgtggctgtcaccatgttctctatgtctgttcatcgctgtgtgctttgtcactatgcctctgtgcctgacaacacatttgcctgtcattgtgttttctgtgagcatgcatcagtgtgtctgtcaccgtgtctgtgacagtgtgtctctgtgactgtttacgtctctgtcactctggacctgtcactgtggctctgtctatatctgtcactgtgtgtcaccgtgtctgtccctctatgtgtcaccatctacccaggtgtcaccatgcatgtgttactcatcgcccaggccacaggtgggtgtgtcgggcccactggtgccagggctgtggcccagcccctcccacccttgctgaccgtgggccaggctgggcgcctatttgcaatcctgccccaggtaaacaccaagatccggaacccaagggccacctccctcacctctgctcctgcccctcagcctgttctgggctggaccagagccctgcagacagtgtgccccagactggaaatgggccctgagcctccccctaaccctgggcaccagcctccccaagccttcagcctcaactctctgtctgtctgtctgcttctctctctctctcactgcatgtcgatttctctgtttctttttgtgcctgcttcctctcacctgggcttctctatggctctgcctctctctggaatgacgcttgtcttcattctgtcactgtccctctttctgtggctctttctgtctctctgcagataggttccatttctctggatgttcagctgatgtgtctccatttgagtccgcctgcttcgtgacacttgctttctatctaatgctggcactgtctccgtaagtctgtttctgtcccactttgtaagtttctcccccaccttctctctgtccaccgtctctctgtctactctgagcctcttagtcttgggcactatctctgtgggtctctgagtccccagcccccacaggggcagactgccatgcctggacccttaggggagtgtgtagcccccagtctcccccagccagtgtgctggtgtgtgtgtgtgtgtgtgtatacacacacacacatatatataaatgtatatgtgcatattatttatatctgtacccaggcaggaggggaagacactggggcctttgtgtagccgctgccctcctgcccgccactcttctcccttcgtccctgccgcccgcccacctccactccccctgcacagaaaggttcctgtggggcctgccagcttcctctgcctgaggtgtgagtgggcacgccacgggtgaggcaggcaggagggcctgggggatttttccagccccaggaagctttccgggtggggagggttctggaaggaatgggagttctcagcagggctgctgtgggtctgtgtggatctgctgtccctgagtgtccccgggccctgagctggcctctccctgggggtctctgagcctgttcgtccatctagttgccattctgacgttttctctgttggtttggggtctcactcacacatgcacacacagtcatcgggcatttgtgttgggctccgtgttgagaacacacagataaatgtcggtcccagcgggttctatgccgtttctgtctcatttgctccatccctttaccctctgcttgaaagctcccaccttttcctattaaaacaaaattcaggccaggtgcagtggctcacgcctgcaatcccagcactttgggaggccaaggcgggcggatcacttgaggtcaggagttcgagaccagcctggccaacatggtgaaatcccgtctctactaaaaatacaaaaattaaccgggtgtgatggtgggcgcctgtaatcccagctactcagaaggctgaatcaggagaatggcttgaaccctggaggtggaggttgcagtgagctgaggtcgtgccactgcactccagcctgggtgacagagagcaagactctgtctcaaaaaatataaaaaacaaaattcaaagtccttatcacagtgtacaggtcctcttactgctcccccaccatccctctgattcaatttcctactactgtcccccagcactggtcacctggttgcttctgggacaaaccaagcaggctcccacctcaggacctttgcaggtgctatttacacagatttctgctggcttactccctcccctccttcagttcttagtgtcacgtgctcagtgagctcttccctacatccctttctaaaatagcaaccccaactggacacggtatctcatgcctgtaatcccagcactttgggaggctgaagcaggcagatcacatgaggtcaggagtttgagatcagcctggccaacatggtcaaaccccatctctactaaagatacaaaaattagccaggcatggtggtgcgtgcctctagtcccagctacccgggaggctgaggcaggagaattgcttgaacccgggaggtggaggctgcagtgagctgggatcgcaccactgcactccagcctgggcgacagagcgaggctctgtctcaaaataaataaataataaaataaaatagcaaccccggctgggtgcggtggctcacacctgtaatcccagcactttgggaggctgaggcgggcagatcgtttgagctcaggagtttgagaccagcctggccaatatggtgaaaccccatctctattaagataaaaaaaaagaaagtaaaatagaaacccccatcactctttatcccctttccctggtttattttttcttcttaggactgaccattctaagtgtctttttttttttttttttttttttgagacagagtcttgctctgtcaccaggctggagtgcagtggcatgatctccgctcactgcaacctctgcctcccgggttcaagtgattcccctgcctcagcctcccaagtagctggaactacaggcgtgtgccaccacgcttggctaattgtttgtattttggtagagacgagatttcaccgtgttggccaggatggtcttgatctcctgacctcgtgatctgcccgccttggcctcccaaagtgctgggattacaggcgtgagccactgcgcccggctggctgtcacattttatggtcctgtttccatctcttacctgaatgccagctccatgagagcaggggctggattctgtttcctgctccatccacattatctcccccagtgcttgtcacatggtggatgctgaataaacacttgttgaggaagagaagcagtccattaatctatccatcccttaagctgaccctgtgctgggtgatgctggggacgcagtggtgatcaagacagccctggccttgcccttttggggctcacagtctgcttgccagacagcaacactccagaatggacagggctgggattgggggagcacagagggatatgtggggtgcagaaatggcagctgatgcagcctgggggtcaggcttcttggaggaggtgccttgactggggactaaatgacccaaacagatccaaccttgcacttcctccagttccctgcctgtctcacagaactttcgagtttgatgatgtcatcactctagttcacacctgtgccttttcctgatttcagtctttctcatctctcctttttttttcatctctttattgccttctctctgcatctcagtctcccctcttttgcatctctgttgttggcagctcatccgtacatctcagtctcgctcaacccatcagaatattgtccatttccttttcttttctgtctctccttctctgtgtctgcctcatctctgaggctctctggagtctctccctgtctcactgggtctccggcttctgcgtctccttgtctcgttcagtgagctggtctctgcatctctccctccccacctctgttgtctcccatcattccctgagtgtctctctgcgtttcccctatctccaagtctctctacctgcttcctgattcccaaataaatccagaacccctccaccctggccccaccctggcactgggggaaggggggctgatccagcccccacacccacacaggtcaggccttctgctctgttaatggttaactcaacctctatctagaatacacaccagccaggctgggggtgactcccctgccccccacccacctaccagctgttcttaaaggaccaggtgtcctccacagcaatttagctcccgctgggacataggagccaggtgtctggaggcctccagctgtaaagatttgggggtgggggagatacccggcacttgggtctgcagagctgggtcaggggaagccacaggcttgcctgggaggggagcccaggcacaggagctccatccaggtctctcttgccccaggcttatcacctggtgtatttaatcaggggtggttttcccagccctgccctgagcccaggctggcagtgccaggggtggcagaacacctgagagctgacggctggggggtggggaaggatgggacccctcagtccaagaacagagggtcctccagatgcgaaggttgaagccctaggatccctaatatctgggagttaggacatgtaggtatgcaagtatgggtgggacccctgggtaaccgagctgatgggtcaggactttaggggcctccagattcaggtgatgggaaccctgggttcccgaggacatctgggggcaaacttggatcccagagctgtctgacagtgctgggtggtggttggacaatcattccctatctctctgtccatccgcgggcctctgagccccgcattcccccttcccggaatctccaccttagcttggccggggaggccgcaggggtgggggctgggctcttggggccgccccctccccttaacccctgctttgccgcagcccgctcaggccccgccccgtgacgccagcgagcaggaagtcctggttaatgatcagccacccggacaggtgcgggacaaggccgcgcacatcagaagcagccgcggagcgagtgcctttcactctgctctctagggtggccgccaaaggggcttgtctcccaagacgagggtgaggaatccagctggggcttcccaaacgtccgcctctggggcaccgccagaggcaagaagtagccaagttgtttctaggcatcctgttagtttaccccgtggaggtaaatttcctctttcctcgggcagtccctctagcagtctaccctaaattctcccttctacccggcaagaacccactgcccatgtcttctaggaagcctcccgctgcctctttcccctccccacgtaggcgctgagtcctccaccttccaggtagagataggggatgggtcagctacagaagggtaatctactcccaagcctgtctgtggctcccctgcaggagccatcccctctctgagcctcagtacttttatctggaaaacgggccgatggctgaaacgtgaccagtgggtcgcacttgttgaaggtcggccggcgggaccgcctgggtgcagggcgccacctggaggctaccgcgcaacgtcctcgccctcgcaggaccagttcagtcccaaagggggcgcagcatctcacacaactaagggaccaagaaggaaaaaaaaaacccatctttcggtttattgaaggagcagaagggagcggggggtgggggggtgggaattaaatgcttttgcctcgtttataaagagcgagttttcaggaggtcccttctcaaggaggaggggggcacctctcccccaactacaagcagcagcaaagccaagccaaggaggacagagggaaactggaggggccaagggaccccaaacaccccctcggacaggagccacaagctttctccccccacccacaatgcatctaccccaggggacccatctgggtggaagaagggagtatgtacacagatagaggtggcactgggctgggtcggggagggaataatttatccgcggcagcggtgggtggcaaaggggcagagggcagtagcctggaggcagtggtagcctaggggtcccgttctttcttaactttgatgtctccagcaaggatggtggcgatctcgccctgcatgaaggcccagggcacggaggagccgaccagcgggcacttgtctccgctcgggcagtacacctccccggccgggccctgcgccttgatgaactcccgggagcagggaaagcagaacttgtgtccgggcaccgaggggcactggacgaagtgggtgtcttctagccgctccctgcacagggtacagcacaggggggccccaggggtcgccccagtgccgctgccacccccgctgacagcttcggcccccgctgtgggactgacttctgcttcgccgttgcgggccacaaggcgatgctgggttggcggctgggccgtggaggaggctgcagggctggcgccccctgcacgcacaggccccccgcctccgccagggtccttgggtgagtggcccagggcttcggccacattcttcagggcggcaatgggcgagggcacaccaggggtctcagcggagtacgggccgccgggtgccacccagtgccgttgctgctgctcctcggtggtcatcttcccagccgcctcgccctccggctcgggggatgccttgcgacggcgcggcgtgggcgccaggttccgggatggggctcgcgggggtgggccacagagagccgcaggggccggctctgggtactgctggggcagggcctccgcgggagctggctcgcggaagctgcggacgccgtcggtaagcagctcgcccagctgccgccattctcctgatccatgccggcgttcatattcgaggtacttgaagcccgaagaagccagtgccttgcccggctcccgcagagcatcgtggaacatctggcgagccactgccaggacgccggcgtacacattgccggaaccacaggggtattcggtgaagagcttcagctcgaactcgtatcctggaggacgggcagtagcatcgaaggcgaacactcgccccaccagcccgtgatccttcttgaagcgcacattgaacggggcgcaggcggacagcgccagtagctgttcccgcactgctttggggcgcccgtgccattcctctgcccggcctcgcatggcctcgttcagttctgccagacagtccgcattcctctgctgcttctctttctcgaaatcggagccgaagaggggacgggcaggactcaagccgggtgccagcgtcaggcctcggcttcccaggccagacactgcagctgccagcagcccagggggcatcaagccaggcatggagccaagcaaggcccttcgcgccccctcagccacggcctcctcacggcccagcccattggccaggcgggaccccagagtgtactccagggcgggcgagggcagggggaggcggcctgatgatgtggccctgtcatagcggtcctggcccgacacgccgccgccggtccctgacggctggggctgggcctgcgggggcggcagctggggcccctgtgcggctgccgccgccaggtccttggtggccgggtgcttaagggccgggggcccgggcgagcggccctcggggagcacgtggctgcgcttgagctggcgggcggcatcgatgagcagttcgatgcggtccgcgccctcgaagttcacgcagccgcgacacacggcctcgctgaagtcccacaccatggcccacggcatcttgggcaggtcgcacaggtagcaccactggcggcgggacgcctgcacagacgccatggccccagtccgcgcgccgcccagctcccgcgttccaccggccgccgacgtgcgatccgcgccgccaacgttcgatccgcgtcccggggacagcgcgagccacggtccggcctccggctcggcctccccgccggatccaggcccggccccccttccccgccccctgggccctaagcctttctgctcactcccgcctccctcgcgaaggcaggctgaggcacgtcggcgcccccgcccggtccgggctccgagccgaggcgcacagctcgggccccacgatgggccgcgagcgccgccgcctcgggctcccgccgctctcgccgccgccgctgcaacggccgccgccgcctccacctccttcttctgccccagaggccgcttcgcagggaaagttacataacacgcctgcaaagccttctgggaaacgtagtcccgccggggccggctcttaaagggaacggcgggcagacgcgggctgggggggttgtcgcctctgccggcgcaaaccttacaaccttctccgtggggccggagttcagcgcgccgcaagatgctgggacacaaaggtggtaggcgaggatgcaatacaaatgatcagagctactccggattcagaaattgtgggggtgggtggacaggcttccgggcttccaacttctgctcggatttgctgtgcagctttaggcaaaatgtcttgccctctctgaacctcagtttccccgcccagcaaaggtgggccaatgacggattaggaaagtagcagcttctggggcggggcggagaagccctgattggcttcagagcagggacgggaagctggcaactaggtgggggtgggggtggccacctggcacttcgtcctccccccggaatcctagatatatgcttctggggcccgccacagccagagaagggagaggactaagggcttccgagccagagccttgtctcagttgtttctctgctaaaagagtggggcgactggccgccctctaaccctgtcccagctctgcccgcgcgctctggtctctaaagggttacaccatcgggggctcggcgtcccccacccgcttcactacaattcccaaaatgcactgcgggtcggacatagtgacgcacttccgccctctgggaggtttggggaggccttccagattcacgctactttcccggctaccccccgcccccccacttttctgggggctctttacgtgcattcggagcgtggcgtttgggggacccttatcttctgttgctccccagtttgagggaagagtaaggggttaagaagtgacgggcaagaggagggagttgctggggaagggcaaacaccagaccaacctttccccaaccttgagcgctcactacctggaaggcccaatcaggctgtgaggacccttcttctttcccaggcattgggaactggacgaggctgtctttggggaagggcggaggcgggtctccaggttccaacccacaacagcccctttctctaggcctgggtccgtgttaggtgctcaaaaatatttgaatgacgtaccagttggccctggttttgtctagtgaggggctgcttgtcccttctcctcccgtcccactggaaccgcagcagctctgattctgttacccagacctcacaattttaaaatggtttcacaattttgtctactacctgtatttgaacacttttctcccttaaaaaaaagatttatcaggctgaagtgggaggattgcttgagcctggagataacaggctacagtgaaccatgattgcgtcactgcactccagcctgggcaacagagcaagatcctgtctcaaaaaaataaataaaaataaaaagatttatctatttttgcctcatcctaggtaatacgttcacaatcatgggtttcatgtactgtggttaccttaaaaaaaattagtgaaaactatcgactcattcaagaggacattaatatgtcacttaaagttgcctttgggctattatttacgaaacactaatgggagttaaggcttctggccagattcagccttcaggtggactggattggcctctgaccagctgtggccttgggccagtttctaaacttcttggaaaaaatggagaccccctccagtctccttttatttgggtaccttcagattgaatgcaaacatgcatataaatgcttagcttggtgcctggcacagaaaataagtgccacaaatggaagttgtttttaagctggacagttattcaaatattcaacccctcttccatgctgggcaatgctggggacatagcagtgactgagacaggctttaagccttgcccctgagaagccccagcctggtgatggaggcagatagtaaatttactcaaatgatgaactaaaatttgtgatgactgcggtggggaatgtgtgtcaggaaaagctttcctggccatagtggctcatgcctgtaattccagcactttgggaggccgaggagggcggatcacttgaggtcagaagtttgagaccagactggccaacatggtgaaaccttgtctctactaaaaattaaaaaattagggggccgggcgcggtggctcacgcctgtaatcccagcactttgggaggccgaggcaggcagatcacaaagtcaggagattgagaccatcctggctaacacggtgaaaccccgtctctactaaaaatacaaaaaattagccaggtgtggtggtgggcgcctgtagtcccagctactcgggaggctgaggcaggagaatggtgtgaacccggaaggtggagcttgcagtgagccaagatcgagccactgcactccagcctgggcgacagagtgagactccatctcaaaaaataaaaataaaaaaaaaataaataaataaaattaggccggacagtggcagtggctcacatctataatcccagtactttgggagccctatcacttgaggtcaggggttcgagatcagcctggccaacacggtgaaacccccatctctactaaaaagtacaaaaattagccaggtgtggtggcgcacacctgtaatcccagctactcaggaggctgaggcaggagaattccatgaacccaggagatgagttcacaccactgcacctccagcctgggggacagatgcaagactccgtctcaaaaaaaaccaaaaaacaacaacaaaaaaacaaaaaactaactaaataagtaaaaatacaaaaattggccaggtgtagtggcacacgcctgtagtcccggctacttgggaggctgaggcagaagaatcacttgaacccgagaggcagaagttgcagtgagccaagaccgcgccactgcactccagcctgggcgacagagggagactctacctcaaaaaaagaaaaaaaaaaaagaaaagtataatctaattataggaagaaagactctgacatctttatgtccattctacagatgaggacactggaagccaatggttacacagttggccagggcagcaccagtacttgagccacgtcttgagtccagagtggtggtgattatctactttgttacctggccctgcagcagagtaaaagaaccagttcctgccttcatgacattatgggcaaatgtgccttaaatagataaaggcctgtgttcatttagagtcactatgaaaaagaacccagctgtgtgtggtggctcatgcttgtaatcctagcactttgggaggccgaggtgggaggactgcctgagcccatgagttccagatcagcctggacatcatagaaaaccccatctctagaaaaataaaacaattagctgagcatggtggcacatgcctgtggtcccagctacttgggaggctgaggcagaaggattgcttcagcctgggagatcgaggctacagtgagttgtgatcatgccactgcactccagctggggcaacagaacgagatcctatctcaaaaaaacggaaagaaaagaaaagaaaggaaaagaaaaagaaaaagaaccacaggacactgaaagagactctaagaggcaaacccacgttagccttggggaaggaatctaggactttctcctggagttgacatttagactggtatctaaaggaagagtaggaataagatttcatgtaaacacaagacttgatggctttaagaattaaaaaaaaaaaaaagctggaaaaccaccagcctcccaattgcctgcctgtggagggggcggggcaggtgtaggtgctggtcccccaggcctgtctcagacagagcctcaagtaattgtattaaaaataagtttattgatatcttgtcaccactgggagaaaggagggggttgagctctggaagtcagagacagcaatggtaggcagagaacccaacctgtacctctcccatcagaactcggcgcctcctctccctggggtatacacggctatatcctctttgtcatccgtattttgatttgtcttacaactcccacccgctccaaagtctgggttggggaggtggggagtcccccacgggtcaattctcttcaagtcaagaacaggaactgttagggaaggggagatgtgcagacccgagaggttccctccccaccccacatagggcaataataaataacatgaaattgatggcttagaagtcagggttaagggaggcagccaggcagacagcactgtaccagagaaaggggttgggggggcccattactgaggccccccccagagaatcaggcactaactagcacagggagtgggtgctcacatccctggagcagggagctagggtgcagctgggatgggcagagagcatcgcccccctcgactgcgccaagctggggagaggggttgcaggcaggatcatagatagtagatttcacggagatttccatcggccgcgccttttccgtgtagggaaaccttttctccgcttgtgtgggggggagtcgtgcggagggagcggggctggggggggccggggtgccccctcctcgctccttggggcaatgatcactcccctggctgccaccactgccccgtccaccacagcagccaccacggacacgggctctggggtgatctccaccttgggggccggtgggggcaggacaggcctgggaggtggcggtgggggtgggggtgggggcagaggtggaggcagggagtcaactggggttcctggcagaaggggcagcagagcgctgagggcctcgctcagtttggccagtccctgtcgaagggtgccggccagctcccggatggcgttggcagtctcctgctgggcccgcaggaagtccagggaggggtctgaggccgagagcgtgggtggaggccgaggagggggtggggggctagggggtgagggtgccacttgggccagtggcggtgggggtggcagtggaggggctgggggtggtggagacaaggccaggcgaggcagctggaccggctgcagggccgaagggggtggtgactcacgctccttgggccgtgggcagcccccttcctggggagtgcaggagggccgggcccatggctccgggctgctggagcccgccttgctgtgggctgatgtatctgtagagagagaaatacaggtaaggggtgagcgaccctcgatgctgccttgatttcccctttcccactccttccctcacctcccccctacccgaacccagaactatccttctcacccccgccccccagccccaagacagtcttggtctgtcacccaggctgtagtgcagtggtgcaatcttggctcactgcaccttccacctcctgggttcaagcgattatcctgcctcagcctcccgagtagctgggatttcaggtgaccgccaccacacccggctactttttctatttttaataagagacagggtttcaccatgttggccaggctggtctcggactcctgacctcaggcgatccgcccgccttggcctcccaaagtgctgggattccaggtgtgagccaccgcgcctggccccagaatgatccttttaaaacctaagtcagatcatgccttggaagagaagctccatggcaggccagtctttgtacccggaggagaaaaagtcctgccagctttagtggaaacaggtcctggaagtcccttgctaggccaggcagctcccatctcactcacagtaagagccaacagtttttttatttttttaattttttttgagacaaagtctcactttgtagcctaggctggagtgcagtggcgtgatctcggctcactgcaacctctgtcttccggcttcaaacgattatcctgcctcagcctcctaagtagctgggattacaggcaggcgccaccccgcctggctaaatttttgtatttttagtagagatggggttttgccatgttggccaggttggtctcaaactcctgacctcaagcaatccacccacctcggcctcccaaagttctgggattacaggtgtgagccactgcgctcggacaagggccaacatttgacgaggttctgaactatatggatactgcaccacactgctggatcctgaggaagtgagagagaggtctgggagagagctggggtgtctgggcactggtggacacttccctgagactctctccaaccaggacagcaggattttccagttcagcccccagcctggtaggtttcctcagtctgtactcacctggggtctcattcatgctcatgggcttgaacagtttgcatacaggggctcccagcttcctgggctcagcctgaacctctcgcctgggctccagactcctgtctccagctgtgtactctcaattgtcgaaaaacgccccaaactcacttgctcggagctgggcttctgatcctcccccaccctgctccttcctcagccacccccatctcagctgatgcagctccatcctcccagctgctcaggttaaacaccttcactgttttgtttactaagacaccatccacatacagaagctatcgtctctgccttcaaattaaatacatacaacttctttcttcctggtcccccaccctggcccaaccaccagtatctcccaccaggaccactgcagtcatcgcctccctgagggctctctgcttccacccctgtccctgacagtatctttttccaccagcagcctgaggggtccaaccaaaatacaagtcagttaggctacgggaaacaagctagtcacaaagaaccacagatcacaggggccatttatatgaaatgtccaaaataggcaaatttggccgcatgtggtggctcatgcctgtaatcccagcactttgggaggccgaggcgggtggatcacctgaggtcaggacttcaagaccagcctggtcaacatggtgaaaccccatctctactaaaaatacaaaaaattagccgggcatggtggcatatgcctgtaatcccagctactggggaggctgagacaggagaatcgcttgaacccgggaggcggaggttgcagtgagccatgatcgtgccattgcactccagcctgggcaacagagcgagactctgtctcaaaaataaaaataggccgggtgtggtggctcacgcctgtaatcccagcactttgggatctgaggtgggcaaatcacctgatgttgggagtttgagaccagcctgaccaacatggagaaatcctgtctctacgaaaaatacaaagttagctgggcatggtggtgcatgcctgtaatcccagctactcaggaggctgaggcaggagaatcgcttgaacccgggaggcagaagttgcagtgagctgagattgcatcattgcactccagcctgggcaacaagagcgaaactccgtctcaaaaaaaaaaaaaaaaaaaaggcaaatctatagaaacagaaagtagatgagtggctgccgggggctgggggaagacagggaagatgggagattggggatggctaagaggtgcagggtttctttctggagtgatgaaaatgttctaaaattgatcgtggtgatggttgcataactctgaatatactaaaagccattgaattgtacgctgtattttattttactttttttttttttttttgagatgggagtctcactctgtcgcccaggctggagtgcagtggcgcgatctcagctcactgcaagctccgcctcctgggttcacgccattctcctgcctcagcctcctgagtagctgggactacaggcgcccgccaccacgcccggctaattttttgtatttttagtagagacggggtttcactgtgttagccaggatggtctcgatctcctgacctcgtgatctgcccacctcagcctcccaaagtgctgggattacaggcatgagccaccgcgcctgatcctgtacactttatttttaatttttatttattttttattttttgagacggagtctcgctctgtcgcccaggctggagtgcagtggtgtgatctcggctcactgcaagctctgtctcctgggttcacaccattctcctgcctcagcctcccgagcagctgggactacaggtgccctccaccacgcccggctaatttttttgtatttttagtagagacggggtttcaccatgttagccaggatggtctcaatctcctgaccttgtgatccacctgccttggcctcccaaagtgctaggattataggcgtgagccaccgtgcctggccttaattttcatctttttttgagacacagtcttgctctctcgctcaggctggagtgcaaaggtgagatctcggctcactgcatccttaatctccccagcttaagcgatcctcccatctcagcctcctgagcttctgggaccacagaggtgcgaccccacaccaggataattttatttttttgtagagatgaggtctcactatgttcctcaggctggtttcaaactcctggtctcaagcaaatcgtacactttgaggtgattgtatagtgtggaaattatatcgccatatatatatacatttttttcttttttcttttttttttttgagatggagtctcattcagctgcccaggctggagctcagtggtgcgatctcggctcactgcaacctctgcctccagggttcaagaaattctccaccctcagcctcctgagtagctgggactataggtgcacaccaccatgcccagctaatttttgtatttttagtagagacggggtttcaccatgttggccagatggtctcgatctcttgacctcgtgatccacccacctcagcctcccaaagtgctgggattacaggtgtaagcactgcgcccggccttatattgcaatataattgtttaaaaaaacacaagtcagatattgtttctatgctcaaaccgtcctgtggctctcacctcactcagggtaaaagcaaagtccttgaggcctctagggccctgcacgatcttcccccattgccttcctgacctcagctcccatccctccctcttgggttacctggctgtagccacggtggcctccttgctgatcctcaaacacatcaggcctacttcttttcttttttttgagacggactctcattctgtcgcccaggctggagtgcagtggtgcaatctcggctcactacaacctctgcctcctgggctcaagcgattctctcacctcagcctcctgagtagctatagctgggactacaggtgtgcaccaccacgcttggctaatttttgttttgtttttgtagagacagggttttgccatgttgctcaggctggccccatctccttctttttttctcccctaaccctacctgattcctctcccagcacttatctccacctggcacggtatggctctgtgtctgctgtctgtctcctcctcctgatgtcagctccatcaggcagggctttgtattgctcccttctgtttacccggcgcctagaacaatgtccagcacaacattttttctttaacgagaaaagaactggggcttccagagactcagcgctgattgggtcccaggccccagagtgcccagcacccacaggagaaagtccagcctcttcccacggctatggggcctcagcacttgcccccaactccgcctgtcttcccacatgtcgttccctgggccaggctcacactgcctcttgcatcagcttggatgtttttttggatgttccttcctcggggaagctggcctcctgctccttggccaaatcagatcaccctgctcttctctcaaaaacagccagccaaagaaagagagaagatagagaaaaaaaaaataacaaaaacaaaaaaccaaccatccaggccgggtgcggtggctcagccggtaatcccagcactttgagaggcccaggcaggcggatcacctgaggtcaggagtttgagaccagcctggccaacatggtgaaatcctgtctctactcaaaatacaaaaattagccgggtgtggtggtgcacgcctgtgatcccagctacttgggaggctgaggcacaagaatcgcttgaaccctggaggccgaggttgcagtgacccaagatcacaccactgcactccagcttgggcgacagcaagaacctgtctcaaaaacaaacaagcaagcaaacaaatcagccacctcctaccctgactgctgggagtccagcctccctgggccagccaccagcaggaggtagggaggctgggagacagatgagtagagcggacagtgacaggacacctgctcccgccaggccctgggctaagctcccctcttaagtgattccacctagtcttcccagccattctctggggtaggtgctaccatgatcatcgccccattttatagatgaggtgatttgaggctcagagagaggtgtcatagagtgatatgcagaaaagggatttgaacccaggttgactccagagtccattcttttttttttttttttttgagacggagtctcgctctgtcgcccaggccggactgcggactgcagtggcgcaatctcggctcactgcaagctccgcttcccgggttcacgccattctcctgcctcagcctcccgagtagctgggactacaggcgcccgccactgcgcccggctaattttttgtatttttagtagagacggggtttcaccttgttagccaggatggtctcgatctcctgacctcatgatccacccgcctcggcctcccaaagtgctgggattacaggcgtgagccaccgcgcccggcctcttttgttttatagagatgggagcctcgctatattgcccaggctggtctcaaactcctggcctcaaatgatcctcccgccttggccttctaaagtgctgggattaccggtgtgagccactgctcctggccagagtccatggcctttttttttttttgagatagaggctcactccatcacccaggctggagtgcaatggcgtaatctcagtttcctgcaatttctacctcccagtgcaagcaattctcctgcctcagcctcccgaggagctggaattataggcatatgccaccatgcctggctaatttttgtatttttagtagagacaaggtttcaccacattggccaggctggtctcaaactcctggcctcaagggatccgtgtacctcggcctcccagagtgctgggattacaggtgtgagccaccacaccaggccagagtccatgctcctaaccattccttgggcaagggctgtgggcctggggtgtgagtgacaaatcttccttataaggaacgtgggaattgcagaaacgtggcttttccagtctactgagtaaaaaggaacagaaagtagcccagccttcatgcccacaaggctcacaggagtcacagcagtgcccctgcaagagtttgtttttggttgttttgaggaagggtctcactgtgttgcccaggttggagtgtagtggtgcgatcatggctcactgcaacctccgcctcccaggttcaagggatcctcatgcctcaacctcatgtgtagctgggaccaaggcgccggccaccatgcctggctaatttttggattattttgtagagatggggtctcactttgttgcccaggctggtcttgccctcctgggatcaagcaatcctcccacctcagcctcccaaagtgctgggattacaggcatgcctctgtgcctggcttccactgtttaaaagttaaaatcatatttatttgcaaactttggatctcagtttccctacttgttttcttttctttttttttttttttaagacggagtctcgctctgtcacccaggctggagtgcagtggcacaatctcgactcactgcaacctccacctcccaggttcaagtgattctccagcctcagcctcctgagtacctgggactacaggcgtgtgccaccacgtccagctaatttttgtattttttagtagagacggggtttcgccatgttggccagactggtcttgaactcctaacctcaggtgatccgcccgccttggcctcccaaagtgctgggattacaggcatgagccaccgcagctggccctcagtttccctacttgtaaatgagtgtgtgagctggtactacacagagtgctgggatttcaggcgtgagccaccatgccaggcctgtgtatggttcttttttttgtttttttttgagactgagttttgctcttgttgcccaggctgaagtgcaatggcgcgatcatggctcactgcaacctctgcctcccgggttcaagcgattctcctgcctcagccttcctgagtagctgggattacaggcatgcgccaccacgcgtggctaattttgtatttttagtagagacggggtttctccatgttggtcaggctggtctcgaactcccgacctcaggtaagccacctgcctcagcctcccaaagaactagtattacaggcgtgagccaccgtgcctggccaggcctgtgtaagattctaatcgaggatgctctacgcgtgttcctgcctcagagcttttgcacgtgctgtttcctctagtctagcaggagtgcccttctcccagatgtctgtcaggcctactctattcccatctctacttgaatttcaccttctcagagaagccctccctgattaccctgtctgtatagcccccttccatgactcaccatcctctgaatatgacttatttatcctcttagttctcaccacctcctggtatacagtctgttttgggacttctttgtggtctgtttcctccaactacatagaatgtcagctccaggtcgggtgtggtggctcacgcctgtaatcccagcactttgggtggccaaggcgggcagatcacctgaggtcgggagttcgagaccagcctgaccaacatggagaaaccccatctctactaaaaatacaaaattagccaggcatggtggcgcatgcctgtaatctcggctactcgggaggatgaggcaggagaattgcttgaacctgggaggcggaggttgcggtgagccgagattgcgccatttcactctagcctgggcaataagagcaaaactcagtctcaaacaaacaaacaaacaagcaaacaaaaaaagaatgtcggttccataagggaaggggattttgtctttttctctacattattccctgcacctaccacagcgtctgccttggatgaggttctcaatatatatttgctaaacgagtgaatgaagtggtaacaagtttctgaaaaaataagttggccatctctgctctggtcctatggggccatctcacagatggaaacactgaggtttgattcaaggtttgagaacaagggtcccatgtgattgtgtcaccttcctgcttaggagattttcatgcctcctgaatgccctcaagagcaagtccaggccgggcgtggtggctcaggcctgtaatcccagcactttgggaggccgaggtgggtggatcacctgaggtcgggagttccagaccagcctggtcaacatggtgaaatcccatctctactaaaaatacaaaaattacctgggcatggtggcaggcacctgtaatcccagctactcaggaggctgaggcaggagaatcacttgaacctggggaggcggaggttgcagcaagccaagatttcgccactgcactccagcctgggcaacagagcaagactccgtctcaaaacaaaaaacaaaacaaaaaaaatagtaagtccaaattcctgaccttgacttccaagccacgtgtaatctaattctggcacactcattaactcctggtcaatattaactcttgttattgctgggcaatcttgctcagtggttaagtgccatggactgggggttggacgcacacttatgcttgagtcctgactctgtcacttacttgctgtgtgaccttgggtgggtgaatgaacctctctgaatcacataatcttgaactgtcttgtttgatcatgcccatgttcctccccttctccaaactcttcagtggcttctcatagcagtcaggataaaatccaaactcctcaccttggcctaaaggcccagtatggtctggcctttgctgacctctctgaactcatctcaaaatgttacttttcttcaacctttccactctacactcttttccccgcaacttcttttagtttcccaaactggccaagctttcttgcctccaagccattgtacatgctgttccctctaccaaaaatactttcccagttcttcattcttactctttgcatctcagctctgatgtcccctcctccaggaagccctcctggaccacccccccccccaccgaaatcagaaaccctctctgggctcccacagtccctgggatcccctaccccagccctgctccctcaagtcatcaccgtcttccccacccccctactagactggctcagtcatccatgtgtccccaacctcatcgagcatggggcaggtgctcagggaacggctgtagaagaaataatccagaatcaaggctaagcaggaagtttctgtagtcagctctccacacctctatccaaggcatgaccttgggaaaattaccaaacatgtctgagtcttttatttatgaaatagtgaaatagtatgcatcttaccgcattgatgattctatcaagaactaacaatgagagttgaggaggtgctgaactaagcaacttacccatattagctcatttaatcttcacagcaacgctttgaggtgcagactatttttatctccattttacagatgcagcaactgaagtacagtaacttactcagatgacacagttcagtggcaaagttgtgatcggagcccaggcagcctgcctccagagtcactactcgacactgcatttaatgaaatcctgcctgtgctgatgaccccaggtgtggacctgagtcaggcctcctaaatctggttccattcctggctcttgacagttactagctatcggaactgaggcaagtcatttcatttttctgagcttcagtttccctagctataaaatggggcgaaggacagcatccacctcacagggctgcagcaaggctttgatgagacatgtaaaaggcttgcaacagcgcaggcacacagcctactctgaagacactcacctgcacgtcggtcctcccggcggtcttccgacaacacgtagcgctgagggcaggcgcttgggggcggcggctgtgaagagggggccgcagggggctcctccgccccagcacctgcccccggcgccgccacacctggccccaggatggcaaaaatggtctcctcttccgcggagaaagcgtcctccgcggcgggcccggcgccctgcgtggagtgcggcacgcgagcgagcttctccttggtgcggcgcttgaagtcgttccagcgcttctgcacctcctggcccgtgcgcttccagctggtgataccgttgatcttggcggcgatgccgtcccacacgcgccgccgctctgccacgctcacccgacggctctgcgcgccgtagagctgcgggtagtgggcgcgcacctcgcggatcaggatctggttctcttcgaatgagaagcgcggcttgcgcaaccgggtggtttcctccgcttcgcccgccgccgccgaggccatggcgccccccgacgccgccgtcctgccgtctggcgcatggggggcgccggcgctgcgggcaaagggcgcacggggctggctggggttcggggtccccccgccgccgcctctcccagaccgccgggccgagagctccttagtccccgggggcaggagtgggggcggggggcgggcgggggcgacgggcacccgggtaagtcggaagcgcctaagagtagctgacaccggctgagcgcttggctcggacttcgcgcggcgcgaagtgccacgctgaagagttgatagaaattgggggagggtctggagggatggaaggaaaggaggaaaagtgcgaggagaggaggtgtctgcaggagttagagaatgggggcacgggaggataggaaatggagggaggatgggggtgcctcgggggggtcttagatgcatgaagataaggagatgcggaaggggggatgcagcaagaaggggggaatctggagcagaggaggcgctctaggggctctagggggcaacggggcgtctgtaagaccgatatgagaagggcccttagagggatgtccaggaataatggtgaggtgggagctcctgtatcactggaagagctggaacgatcaaatattagggatcagggtctgcgaggattgtgggggctctggggattgccagaaattaaggggagctctggaaataacgggggtcccgtatcacaaggagacaacggaggctacgggggacggcagggagagcgaaggtcgcggagggtggggaccgagtcgggccacgggtcactcaccggctccgccgcagccgccggtgggtcagggctcgggcttctgcggcctgttcccaccccccgcctccctccctcccctctttcggccccgcctccggccgccccgcatgccaaggcgcaggcgcgcccagggccagtcggccccaatgcccttaccgccagggtttcattcccacctaccccagcacagcgcaggcgcagaactgcgctccgccgagccccaccagcaggccgcaactgcgcagccgcaacgttagcgccgcgcgggtaccccagcttcctggggccacaacggcgcacgcgcaaaaactccatcgcgcgcatgcgcgtgcctcgggttgtacccggtaccgggtctcggcgcaggcgttgcgagcttggatgggagagatgctgggagcgcgccagtacccaacctttcggacagtcttccagcccaccctgccctctaaccaaaggggagggagacagcgctgaagggaagcgctttgtctccttgacaactgtgtgggtggggtggaggcgtgaggaaaccgctttgcctcctggcttgcccgcccctgcgctgggccgctccagagcttcccacctcgcacccctagaggctgggcgtcctggggatgtcccgccccgggcggatgcagtaaccatagcgacccacaagccttccagtcacgccttgggggcccctctgtgcgcacctttacctcgaggagcggggaaaataagagggaagagcttcctggctggtaggaagggagatcctgacgccggcacgactttaagcaagtgcatggagacaggaatgaagccagaacgcaggtggggtgagccgcatggcaggatgatggagctcagtccggctgagaagtgtgttcgttagcatcctgcaggagtcctcaaggtcattcgacaattggtgcttcattcatcgactcaataaatatacatgagcacttacacagttcctggtacaatgaacataaaagctaaaatccgtagcctgggccgggcgcggtggagctcacgcctgtaatcccagcactttgggaagccaaggcgggcggattacctgaggtcaggggttcgagacaagcctggccaacacagtgaaaccccatctctactgaaaatacaaaaactagctgggcatggtggtgcatgcctgtaatcccagctactcgggaggctgaggcacgagaatcgcttaaccccgggaggcagaggttgcagtgagctgagattgcaccactgcactccacctggacgacagagtgagactccgtctcaaaaaaaaaaaaaaaaaaaatacatgcctgtagtcccagctacttgggaggctgaggcgggaggatcgcttgagcccaggagttgcaggctgcagtgagctatgatcaggccactgctctccagcttgggcaacagagtaagaccctgtctcaaaagaagagagagagaaaaaaaaggcccctctgcctgctgtgtggagggtgggtgggagggagcaagactactgggtagagtcaaaaaaagtcatgagcaggggtaagaaaaggattaggaaagcgaggggagactaaactaagacagggacagtgtcaagggggacacggagagacatttgagagaatatatggaaagcatggtgagtgtcgcgctagcgagggaaaggaagatgtctaggtgaaacccaagtctctggcccaggttctcacttgggggtgtggggtcaggtaagatgtggtgaatgtaaggctgggtgcagtggctcacgcctgtaatcccaacactttgggaggctgagacaggtggatcatctgaggtcaggagttcgagaccagcctggccaacatggtggaaccctgtctctattaaaaattcaaaaaaaaaaaaaatagctgggtgttgtgccatgtgcctgtaatcctagctactcgggaggctgaggcaggagaatctcttgagcctaggaggcacagattgcagggaaccgagatctcaccactgcactccagcctgggcgacagagtgagactctgtctcaaaaaaattaaaaaaaaggccgggcgcagtggctcattcctgtaatcccagcactttgggaggccgaggcaggtggatcacgaggtcaggagattgagaccatcctgactaacatggtgaaaccccgtctctactaaaaatacaaaaaattagccgggagtggtggcaggcgcctgaagtcccagctactcgggaggctgaggcaggagaatggcatgaacccgggaggctgagcttgcagtgagctgagactgcgccactgcattccagcctgggggacagcgtgagactctgcctcaaaaaaaaattaaattaaaaaaataagaacaacaacaaaaaaaacacaatcaaaaaaagatacgtgagtgtaaagtgaccaacaggttgaactgtttcccccaaaaagagaggctgaagtcctgatcccccagtgcttcagaatgtgaccttatttggaaatagggtccttggagagggaattcgttgagaggtagccataccagtgtagggtggacccgtcattcctcattcccggtgtctttataagaagaggagacacacagggaagacaattctatggtgacagaagtggagacgggggtgacgcagccacaagcccaggaaggccctgtgctatcagaagctggaagaagccaggaaagatcacccgctggagccttgtccggagtgaggccacgcccatgccttgatttcggattttcagcctggtgaatctgggagacaatacgtttctctctctctgttttttttttttttttgaaatggagtcttgctctgttgcccaggctggagtacagtggcacgatctcggctcgctgcagcctctgcctcccggattccagtgattctcctgcctcagtctcccgggtaactgggattacaggcgcatgccaccatgcccagctaatttttgtatttttagtagagacggggtttcacagtgttggccaggctggtcttgaactccttacctcaggtgatccgcctgtctcggcctcccaaagtgctaggattacaggtgtgagccaccgtgcctagccacgtttctcgttttaaaccacccagtttgcggtaccttgtcatggcagccacaggaaacaaatgcactggggaccccgggaaggcattcggggagctgcattcagggagctgctgcctccatggcagtccaggcagagagttgagtctaaacctggctctgggttcacgaggcggtgggaggtggagagccacagcagtggggtatggagctccacagatgtgggtagctggaagctggatgcaggaagtcagagggcaagactcctggggtgagggtgggtcagggaaggctttctagggccacattttctttcttgtcttgcctcttttcttttcttgatggagttttgctcttgtcgcccaggctggagagcaatggtgcgatctcggctcacagcaacctctgcctccctggttcaagcgattctcctgtctcagcctcctgagtacctgggactacaggggcacgccaccacacttggctaatttttgttttttttttagtagagatgggatttcacccgtgttggccaggctggtctcaaacacctgacctcagatgatccacctgccttgtcctcccaaagtgctaggattataggcatgagccactgtgcctggcgaagggccacattttcaaaactgtgagttgtgagtccttttttttttttttttttgagacagagacttgctctatgacccagactggagtgcagtggtacaatcatgcaatcatgactcaaacttccaggctcaccctcccacctcagcctctagagtagctggaactacaggcacacaccatcatgcccggctaagttttaaaattttttgtagagacaagatcccactgtgttgcctaggctggtcccaaattcctgggcttgagcaatcctctgtgaggcctcagcctccaagagtgttgggattacaggcgtgagccactgagtccagccaaaactgtgaatcttgacccattagtgagtccaggaaaatacttaggaagttgcaaggagagatatttaggaggaagaatggacaggacttggaacctgatgggctgtgaggggtgagggaaaaagcctagatctctggccctggagacagggtacattacatggtagggccggccaagatggggacttgaggggtagcagatgtgggggtaagatgctgaagtggtttgggatgtggtgggtatgaaaggcctggggaggtttggggaatgaggaagagcatccaggaacccatcaggtatgtggaagagggctggaggcagaggcggagtggaagctaaatttttgttttgttttgtgttgttttaatgctaaaagaaatggatgcaacaagcatatcaagtgctgccctagggctgggcctggttgctcatgcctgtaatcccagcactttgggaggctgaggtaggaggattgcttgaggccaggagttcaggctgcagcgagctattatcttgccactgcactccagcctggacgacagagcgagactctgtcttttcttttcttctttttttttttttaatttaaaagatagagatgaggtcctgctacatcacccaggctggttttgaactcctgggctcaagtgatcctactgcctcagcctcccaaaatgctgggattacaggtgcgagccactgcactggctgataccctgtcttaaaaaaaaagaaggggccaggtatggtggctcatgcctgtaatcccagcactttggaaggctgaggcgggtggatgatgaggtcaggagttcgagaccagcctggccaacatggtgaacccccgtctctacgaaaaatacacaattagccgggtgtggtggtgcacgcctataatcccagctacttgggaggtggaggcaggagaatcgcttgaaccagagcggaggttgcagtgagctgagatggtgccactgcactctagcccggcaacaagagcgaaactctgtctcaaaaaaaaagaaaaaaaaaagtgctggccgtaggcacctgggatacagcagtgaataaaatactgaactccactctcagagcttcctttctagctggggatggtggatggacaggaagtagctcacttcaatcagggataacacggaggaacagagccagtagggggtatgtatgaagtgatctgttgcaaggaattggcttacaggattgtagggccggctaagcaacttcaaaatccatacacagggcaccatcggaaagtgcaggctggagctttgggcgtgaactgaagccactgtctacaggcggaatttcctcagggaagcttcggctctgctctgaaaaccttttgactgattgcagcaggcccacttagattattattattatttatagagacggagtcttgctctgtcgcccaggttggagttcagtggcacgatttcagctcactgccaacctccgctgccccagttcaagcaattctcctgcctcagcctcccgagtagctgggactacaggcgcccaccaccatgcccagctaatttttttgtatttttagtagagacggggtttcaccatgttggtcaggctggtctcgaactcctgacctcagatgatccgcctgcctcggcctcccaaagtgttgggattacaggcgtgagccactgcactggcctattattattattattactcgagacagagtctcactctgtcacccaggctggagtgcagtggtgcgatcttggctcactgcaacctccacctcccgggttcaggtgactctcctgcctcagccttccgagtagctgggactataggtgcatgctaccatgcctggctgatttttgtatttttagtagagacagggtttcactatgttggccagtctggtcttgaactcctgacttcaggggatccacctgccttagcctccgaaagtgctgggattacaggtatgagccaccgccccctcagattatctaggataaatttccttccttaaggtaaactaattatagtctttaatcacatctatgagatatcttcacagcagcagctggattcatatttgactgaatgactggggacagcggtctagacaagctgacatgtgaaactgaccattgcaaccagagacataataaacaactcagccatgtggcatgttagatggtggtaagtgctaaggaggtaagaaaagtagagatgggttggagggatcaggaatatgtgggtgggaaggcctcggggaggtggcggcctttgagcaaaggcttgcaagaagtggcagagtaggccatgtgagtatctggtccaagagctgtccaaggagccggaagggtgagtgcaaaggcctcgaggccagaatgttccagaagtgttcggggaacagcttagaggccaaagtggctggagaagactgagcaaacgggagagggtgggaaaagagccagacttgggtgagaggcagattgtgtggggccttgtgggctgagatgaggattttggcttttagtcagagtgagacagtgaccacaggagggctctgagcagaggagggagatgagctggcttgtgttttaatgggatcacttttgttgggttttgaaaatatactcttggctgggcacagtggctcacacctgtaatcccaacactttgggaggccgaggcaggtggatcacttgaggtcaggagtttgagaccagcctggtcaacatggcaaaaccccatctctactaaaaatacaaaaattagccaggcgtgatagcggtcacccggaatcccagttactcgggagcctgaggcaggagacttgcttgaacctgggagatggaggttgcagtgggccgagatcatgctactgcattccagcctgggagactgagtgagactccatctcaaaaaaaaaaaaagagagaaagaaaataaaatatactttttttttttttgagacagtctccctctgttgctcaggatggagtgcagtggcgccttcttggctcactgcaacctgcgcctcccaggctcaaagattcttgtgcctcagcctcccaggtagctgggattacaggtgtgcaccatcatgcctggctaatttttgatttttagcagagacggggtttcgccatgttgaccaggctggtcttgaactcctggcctcaactgatccacctgcctcggcctcccaaagtgctgggattataggaatgagacactgtgcccagcctgaaaatatacccttaggggttgagagtagaagcaggaagatcattgaggaggtgactgcagtactctgggtgagaggtggtggggcattggaaggtagtgtgctggagaagagatggtcagatttgggatggatgttgaagctagagccaagaggatttcctaatgaatgtgagatttctgttttggactggataaggaggagggaaggaaagaagggaaggaaggaaggaatgtggggagggagaaaggagaaagaaaggagggcggaagaagaaggcaaaaacgacagatggagagacacgttaagagagaatctggatcgggcacagtggctcatgtgtgtaatcccagcactttgtgaggcctaggagggaagattgtttgaggccaggagttcgaggctgctgtgagctatgaccactccactgcattccagcctgggtgacagagcaagactttttgcgggagggcagagagaaggagaaactgaatgataaacctaaaagtgatctctcaacattcttagtacaaattaaaaataaagacttttgttaatagtgcgatcttggctgggtgcagtggctcactcctgtaatcccagcattttgggaggcctaggcaggtagatcatttgaggtcaggagttcgagaccagcctgggcaacatgatgaaaccccatctctactaaaaatacaaaaattagctgggcgtggtggcgcatgcctgtagtcccagttacttggtaagctgggcaggcaggagaattgcttgaactcgggaggtggatgttgcagtgagccgagatcatgccactgcactccagcctgggtgacagactgagactctgtcccaaaaaaaaaaaaaaaaaaaaaagtgcaatcttttcccttcctttgtataaaattctctagaatgggccagatactggttagcattggaaataggctctaatctatggtcaccactcaccagaacccctggaaccccacgtgtgcacaaatccagtttcagagaccaacacagtggtaggcactcttggccactgtgggagtgtgaggtgcagagacaaagccttggccttatatacttcagagcacactggggactctgtgaggctctaggtctatccttagtggatctaattttcctgccctggttctttgtgggtgtagaactattcccctactctctctcctaagcccaaagtggtgctggagggaagaggccgttctgaagcatttgcttctctgcatggagtctccctgctgtcttctctgatttcctcaggggtgggcgagatggtgtctgatgcacacgggcgccacgcacaagtctccagtggcccctgcatgcccactctgcctctttgtatcttctctgagcccaggaggctgccctgtgtgctctccatctgcctgcctgcctggtctcaggttcatgggaggtaactgcaggaatggggcagatgcaggagaatgaccagctgtcctgcacctggcctcgacctgtccacagcagcaaagctctctgtacctcttcccataactctctgcatgcagccttctcacaggctccaggccggactttgacacgcacctacttcagtccagactccctggatgcctccccagagccccagtgcattcctttcctgtagctgtcatgacaaggtactgcaaactgagtggtttaaaacaagggaaacgggccgggcgcagtggctcacacctgtaatcccaacaggcatgggaggatcgcttgaagccaagtgttcgagaccagcttgggcaacaaagcaagactccagcatgcctgactattgttttgtattttttgtagaaacgggttctcactatattgaccagattagtctcaaattcacggtctcaagtgattctcccacctccgcctctccgagtgttgggattacaggcgttagccactgcacagggcagggaccacaattttcaacacctcgccaatggggtctgggagctcaaagtttaagaattaccaaaaagccggtcctggaagatcccgggggttcacagggccagagaaacccatagacatgacatgaaaagggaatggggatcaaggcaaaggcacaggaggaatttgagagccagttcataggtggcggatgtatcaggggccggctgggaggggaacccaaagccccttcctgtcctgcctccgtgttccccgtgttggatctggccaatgcagctacctgctccttcacgcagccgctgaggacaaagccagatgagaggatggaaacagaggcctgacgcagtggctcacgttgtaatcccagcactttgggaagccgagaagggcagatcacctgaggtcaggagttcaagaccagcctggccaacatggcgaagccccatctccactaaaaaaatatatatgtatatatataaaattaggcaggtgtgaggcactctggagcctgaggcaggagaatcgcttgaacccgggaggcagaggttagttacagtgagccgatatcgggctacggcactccagcctgggtgacagagcgagactccatcacaaacaaacaaacaaacaaaaaagtccaggcgcagtggctcatgcctgcaatcccagcactttgagagaccgaggtgggcggatcacctgaggtcaggagttcgagtccagcctggccaaaatggtgaaaccccgtctctactaataatacaaaaaaaaaaaaaaaattagccgagcgtgttggtgggcgcctgtaatcccagctacttgggaagctgaggcagaagaatcgcttgaacctgggaggttcaatggtgcagtgagccgagaccgcaccattggcactccagcctgggcagcaagaacgaaactccatctcaaaaaagaaaaaacaaaaaccaaaaataaaaattacctgggtgtggtggcgtgcacctgtagtcccgcctactcggtcaccccgtctctactaaaaatacaaaaatggccaggcgtggtggtgcatgtctataatcccagctactccggaggctgagaggcaggagaatcgcttgaacccgagaggcagaggttgcagtgggccgagatcgcgtcattgcactccagcctgggcgacaacagcaaaactccgtctcaaaaaaaaaaaaaaaaattagccaggcgtggtggggcgcacctgtagtcccagctattcaagaggctgagggaggataatcacttgaatccgggcagtgagccaagatcgcaccactgcactccagcctgggcgacagagcaagaccttgtctcacaaacaaaccaaagacggaaacagatacagccatttcaaagacgactagaaaacctttttattcaccagagctcaatactcagggtcccgaccctgtgccaaaaactgaacaacttaaaatctgacgggggcccttcttctctttgcccctaaaataaaagctaggccattgccattcccatccgggtactcaaacccccttcttatcggcggttccttgacttgaacgttggaggttgaaaaacacaggaggaaaaaaaaatgtcctttagtcaactatcacgatttggggggtcggacgggaggtggtcgagagatatgcttctcgctgggggaaaggacccatcggtgatttggggatgggggcaggtaccgggtgcaatgggctgaacaaggggaagaacaaccagggggcattgaaaggtgtcagctcaccccacggctctccatccacaggtgagcctgcgaagacacggtgccctccagtgatacggtgctctccagagtcctactccgctcctgacggatgggtactgaggtcagggaaggaatgaacaggcgtggtccacgatgacaccgtggttctgcaggaggctgaagatggagaaggctggtcttaagtcgacatcccatcttgaagttcttgagtaggcacttctcagccagccttgttcagtatctcctaagggctggcttgggacagcaccgtggaatcctggaggttcaaaaatccaagaactccacaaggaacagagaagtcgaaggggcagggctccagtcaccagcaggccccacgaggacaaaagatccatgaaccggggcccagagggcgctacagggccgtgcaggaagggttcccgcggcaccaaggaccctcaggccaacgcccacaggccagagctccgagggctgacaggtccaagggggcggggctggcctggctcccagcagcctccactgtttcaggatccagccagggtggagttctgggggccagaaattccaaagggctgggtgactggaagagagagtttagggacttgggtgggatggaccaggagggtcaggggtgcgggtggtgagcatctcacgatgctcagcgcttgaccctgcgtccggccgagttgcgcccgctgcggcggtagagggactgctggccaccgttaagcgggcagtacttgagcgtatgggcctggtcaccggtggccccgcacacgggacacacgtagtgcctcaggatgggacacaccaccacgccatccggtgtcttcagctggtgtgaggagtagacgtggcgggactccccgttgtgcttgcagaagttgcacagggtccccaggcccccgttggcccctggcgcccccagcccctgatcctgccccagcggaggcccgggacttggctcctcaatctcttgggtctccagcctttgaccccgacttgcgatcagcgcccacaccacctggctcaggttgaagtagtccttccacatgtcgaagggtggcagctgcatggcaccaaagcaggggtggtgggccacaggagaggggctggggctgggggcccgtgggcaagggcaagagcagcaggcgtttcccagagcagaagggagctgcatccccttttataacgcccagagactcttctaagtaaaggtggagcttaggatttaaagggctcactccctgcccataacccccatctgactttagttcttcacagagatgtggaaggaggtcattcccctgatctctggtcccagctctgctgccaaggtgctctgtgacctctgggaagacacttccattctctgtgcctcagtttccctatctgttcaaagaaagtccatgtctgcaaatatcccccacccctaggctggaggggctgcacccttcatagacttcagagttattcctaatcatcatagcagccaggctgggcgcagtgcctcacacctgtaatcctggcactttgggaggctgaggaaagaggatcgcttgagcccaggacctctaggccagcgtgggcaaaatagcgagaccttgtctctacaaaaaataaaaagacaaaaataataataacaacatgacctgatttattttatttatttatttacttgagacggagtcttgctatgtcgcccaggctggagtgcaatggcacgatctcagctcactgcaacctctgcctcctgggttcaagtgattctcctgcctcagcctcctgagtagctgggattacaggcgcccaccactaagcctggctaattttttttttttttttttttgtatttttagcagagacagggtttcaccatattggccaggctggtctcgaactcctgacctcaggtgatccacctgtctctgcctcccaaagcgctgggattacaggcgtgagccaccgcacccggcctagtattttcattttacagagaaagatatgaagcttggagaggttaaggaatgtatccaaggtcacacaacaaggaaatggcagagtcgggtttcataatcactctgggaactgggaattgatgttaaaagtggcagaggaacttggcacagaacaatctcacttagaatgccccctcttgggctaggcatgctggctcacgcctgtaatcctaatattttgggaggctgaggctagagaatcacttgaagccagaagtttgagaccagcctgggtaacatagtgagaccctgtttctacatataatacaaaatcagctgggcatggtggcatgtgcctgtaatcctagctagtgaggaggctgaggcaggaagatcacttgagcccaggaggtttaggcttcagtgagccatgattgtgccactgcagtccagcctgggctacagagtggaccctgtctttttttttatgagatggagtcttgctctgtcacccaagctgtagtgcagtggcacaatcttggcttactgcaatctccgcctcccaggttcaagtgattctcctgcctcagcctcacaagtagttgggattacaggtgcccaccaccacacctggctaattttttgtattagtagagatgggattttgacatgttggacaagctggtctggaactcctgacctcaggtgtgattcacctgcctcggtctcccaaagtgctgggattacaggcataagccactgcgtctggccaaccctgtctctctaaaaaaaaaaaaaaaatagccctttcttggccccatccattgtcttaaatccttcctggcctttggaacgagcaaaagcctcatctcccgcccaccgcacctggggttcttcttccacccacagtctccatgggccaccttgatattcaacacatagttactgaggctccatattgggtgctggaaattcagcagtgaccaaggctaccttatgcctgcttcatgaacgagttcaggagagcgaccagtaaatgagaaaacgctagactgtaaagacctgctggcctgtgaaccgggtgttctaagagtggctggctcaggaatgggacttggaagctgagaccactaagaagaatcttccaggaagaggaacacaggatatggaaactgtggctgggtgtggtggctcatgcctgtaatcccagcactttgagaggccgaggtgggtgggtcacctgaggtcaggagttcgagaccaacctggccaagatggtgaaaccacccccatctctactaaaaatacaaaaattagcaggatgggcacagtggctcacgcctgtaatcccagcactttgggaggctgaggtgggcggatcatgaggtcaggaggttgagaccagccttggcaacatggtgaaaccccgtctttcctaaaaatacaaaaattagctggcgtggtggcgggtgcctgtgatcccagctactcaggaggctgagacaggagaattgcttgaacctgggaggcggaggttgcagtgagctgagatcatgccattgcactccagcctgggtgacagagcgaggctccatctcaaaaaaaaaaaaaaaaagtaataaaaaataaaaaataaaataaaataaaataaaataaaataaaattagctgggcgcagtggtgggtgcctgtagtcccagctacttgggaggctgaggcaggaggattgcttgaatccagaaggtggaggttgcagtgagtcgagttagggccactgcactccagccagggtgacagagtgagaatccatctcaaaaaaaaaaaaaaaaaaaagacatcctgaaatttgggaacagcaagggggctggagtggctagaatggagtgaagatcccaggatgaagccagcatgatttgcagaggctggacaccctcagactctgcaaatctcccttagggcatgttttggaattggtgagggcgttttgagtttgtcaccgtgattggaggtgtggctggatttagtaggtggggaccagggatggcagatatctcgcagttcgcaccaccaagacctgttctgagccccacttaactttccagtgtcccactgaacacccatctaggtagaaaaacccatttataattatccaaattcagagcctagctatgttttatatataagcactaggtgctttttgcattattttaagataacactcatttttcctggaatgcaaccactgtgttcattctggtcttcaagctcttggtttttctgagaactttattcagttattcaccaattctagaagccacaacactcaaggcaatgctgcttgtggtatctgtctccaaacaacataccatttgtttgtatctcattcatggtgaatctacacagagaggctagtgtctgccctgctcagatgatttttggagtgtccatgcctgagcatttatacacttacatagacattattttattataaattactgtctttttattttccctttatattttggttaggacacgacacgatatccatttttgaaaataaaatttgtgactgggcacagtggctcacgcttgtaattccagcactctgggagaccaaggcaggcgggtcacttgaggtcaggagttccagaccagcctggccaacatggtgaaaccccgtttctactaaacatacaaaaattagccgggcgtggtggcacgcacctgtaaccccagttactctggaggctgaggcaggagaattgcttgaactcaggaggtggaggttgcagtgagctgagatagcaccactgcactccagcctgggcgacagagcaagactccatctcaggaaaaaaaaataataaaataaaataaaatttgtatgttggtgagctatattacctatgagtttaattttcaaggtcctaaagggtaattgcaaaatgttatctataatgttgggggtcctctcttggccccatccattgtcccaaattcccattcctgtaatcccagcactttgggaggttgaggcaggaggatcacttgagtccaggaggttgagaccagcctgggcagcatagtaagacctagtctctataaaaagtacaaagaagttaactggtgatgcatgcctatagtcccagctacttggaagcctgaggcaggaggattgcttgaacccaggaggctgagacttcagtgagctgtgttcgtgccactgcactccagcctgggtgacggagtgagacctcatctcgaaaaaaaaaaaaaaagatcatctatgaaatgaagacacaattgagacaataatcataggcacactcattactgagcatctgtgggctggcaccatgctcagggcccgacctgtgtcatctgtaaatcctcccagatcctgtcaaatagtctgttaatggtcctgttttacagatgagcaaagggagacttagaggggctcaggagcttttccaaagtcatatggacagtaagtgttagtctgggctgggcacagtggctcacacctgtaatcccagcactttgggaggctcaggcgggcagatcacttgtggtcaagagttagagaccagcctggccaacatggtgaaatccggtctctactaaaaatacaaaaattagccgggtgtggtggcgggtgcctgtaatccaagctacttgggagggtgaggcaggagaatcgcttgaacctgggaggtggaggttgcagtgagcccagatcgcaccactggactccagcctgggtgacagagcaagactctgcctcaaaaaaaaaaaaacaaaaaaaaacaccattaaaaataaaaataatgttaaaaaaaaaaaaggtgtttctccggagctgaaacccaagactgtttgaccccgaccttggacatcctcccaccccctgtagaaggagcacgcaaagcccgctgtgagcgaagaacctgcctaagaccccaagggaaagcagcagaccctgggggtcttgcagtgtgtagcgacagattgaggtgggaagccaggaaggatgggggtatttgagccaggtagcttttcagatacagagcagatgagacctgtcagccaccgatggacatactcaagagcagaagagactgtggtcggcagaatggaagaacagtactcctggggaggcaccacgacgggcatgggggtccctgtgctgagtgctttctgcaaagtcacagccttgactttcctcgtgggaggtgtgagttccctgtgtgtgcagggcctggacccagtaacccagtgacagtggttacagctgtggcatctgcgggatgtctgagaatgatgtaaggagaggccgttcccaggctccatggctccccttaacaattgcacctattgttcggagaaccccagatactgctggcttgggagtttttttttttttttctccttattgttttctccctaattgttttcttctaggattctgttatttgggccatggctgctttccaccccccaactccagtattattggatgagttgattgaaagataccccttatccttcttcagacaagctctctttccctggtgtggttgctgctctgagttaagggaacgggagatgatactgactagaaattcatcagccccggtgtttactacgtcctaacctccgcccccaccccaaggccacgaccgctgtctgctaacctgacgccaaggtgccctgtttatttgtgagtttccgtctccgcctgatgcctggcagaaaatagctcttgctgggggtccagagacgagtggggaggggaaagagttagaaaccccgagaaagtgtggggagaaacacgtaaatgggcagcagtgactcccagaaagaccgagggacccgctgcgagaccgagagacctgctcatgcggggaccaagacaggggagatgaagaccagggggagagagaccccgagggccagcgaggtcaccatcatcatcattgtcctcatggtctctgctgcgtgcttgcctgtgccatgtcattaaatccccagacagccttgtcaagtatcttgtaatatcctcatttcacagaacaggaaacaggcttggaggtgacatctgtcatggagtgattcagtgaggctggactgaaatccagatctggggctgggtgcggtggctcacccctgtaatcccagtacgggaggacgaagcaggagggtagcttgagcccaggagtttaaggccagcctgggcaatatagtgagacccccatctctaaaaaaaattaaaaattagctggacttggagtcatgcctgtagtctgagctacccagaaggctgaggtgggaagattgcttgagcccaggatgtcaagaagtgaccgtgccactacattccagtctgggcagacagagcaagatcctgtctctaaaaaaaaaaaaaaaatatatatatatatatatatatatatgttaaaattatatgttgtatatatttatatagttatatataagtaaatatatgctatttttatagaattatatgtgatttatatatatttatatttttatattacacataatatataacattaatatagtaatatatattcataaatatatttgcatttacaaaatactatatatcaacattgatgattaataatatattaataattatatatttataatatataaatattatcaatataatataaaaggtatatgggtacttatataaaatataagatattttatatcttatatataagatattaaatatcttatattttatatattaatatatattaatatatatatttatatcttaatatataatgttttatatttatatatttatatattcataaatttaaatatatatttataatttatatttatatatttattacatataaatatatattaatattaagacacatttattattaaaatatgtatttattaatatttatatatttatatgtgtatattttatatatttatgttatatttatactttttatatatttatatttcatatataatgtacaactgtaatatttatatattataaatttatatatataaatctatatataatataatatatatttatatataaaatataaatatataaaatatatagttatatacataatataaaaatataaaatacatttatatttgtttatattttattgaacatgaatatgataatgtatatcaaaattatatatataattggccaggcatggtggctcacgcctgtagtcccagcactttgggaggagaggcgggcagatcacctgaagtcgggagtttgagaccaacctgggtaacatggtgaaaccctgtctctactaaaaatacaaaaattagctgggcgtggtggtgggcgcctgtagtcccagctactcaggaggctgaggcacgagaatctcttgaacctgggaggtggaggttacagtgagcagagatcacaccactgcactccagcctgggtgacagagcgagactccctctcaaaaaaaaaagataatttaaaaaattatatatgtaattatatataagttaataattatatacatatacaataataagtgttatgtgtatttttcaggttgggctatgtgctatacagaagaaataaagggggcagtggttaggagcggccttttggaagaggtaccatttgagaagagtcttcacggatgtagaggagggagccttgttgatacgtggagacgtgcgacccagacagagggagcagccagtgcaaaggccctgaggttggaccatgactgggtgttcagggaggcgagtgtggctccagtggattgacagggagaatgggagggagtgagcgagaatgcaggacccggtgggccacagtaaggacattgggttgtgctttgagtgaggtgggagtgatgggcgggtctgagcagcagcggggaatgctttgactgaagatctagcaagatttctctaactgccctgtagggggacagacaatgggagttgagggcagaagctgagagcccagtgaggttaaggcaagaggtgatggtggctggactagagggaagggagagagaaagtgtcgaggagtggctgggtgttgattaccgcacagcagcagaatgagatttctaaaatataaatcagatcgtgtcactcctcttgcttaaaacttactctgattctctattatcctcagaataaagtcccaaaacattactgtgacctacaggctcctaggtgatatgtgtcccctcttctcaccttccctgggatctctatgatctcattttctattgcatttggctccagttgctcactcctctgtagccacccaggtgtcatttctctctctctctcttttttttttttttttttttttgagacagagtctctttctgtctcccaggctggagtgcagtggcgtgatctctgctcactgcaacctccgcctcccaggttcaagtgattcccctgcctcagcctccggagtagctaggattacagatgcctgccaccatgcccagctaatttttgtatttttagtagagacggggtttcaccatgttggccaggctcgtcttgaactcgtggcctcaagtgatccacctgcctcagcctcccaaagctgaggctaaagggtgagccgccatgtttttaaaaatatttgcctaaaaatgtttttaaaaacatttgctatatcatggactgaattgtgtctccccaaattcatatgttgaagccctaacacctaggaccttagaatgtgactatatttggatataggaccattattttgtatttatttatttattaaaaaaatttttttttgtagagatgcagtctcactgtattgcccaggctggtcttgaactcctagactcaagcgattcactggccttggcctcctaaagttctgggattacaggtgtcagccaccgcatctggagacagggcctttaaggaggtaatttaaaaggtggctgagtggggctcggtggctcacgcctgtaatcccagcactttgggaggccaaggcgggcagatcatgaggtcaggagttcgacaccagcttagccaatatggtgaaacccgtctctactaaaaacacaaaattggctgggcgtggtggcacacgcctgtagtctcagctacttgggaggctgaggtaggagaatcgcttgaacctgggaggcagagattgcagtgagctaagatcgccacgctgcactccagcctgagtgacagagcgagactccttctcaaaaaaatacaaataaaaaataaataaaaggagtctgttagggtggactctaatccaatctgactagtgtccttataagaagaggggattgatggtggctcatgcctgtaatcccagcactttgggaggccaaggtgggtggtcaggagatccagaccatcctggctaacatggtgaaaccctgtatctactaaaaatacaaaaaattacctgggcatggtggcgggcacctgtagtcccagctacttgggaggctgaggcaggagaatggcgtgaacccgggaggcggagcttgcagtgagccgagattgcgccactgcactccagcctgagcgacagagcgagactctgtctcaaaacaaacaaacaaacaaacaaacaaacaaacaaacaaagaagaggggattgaaacatacaaagagacactagacactctgtgcacagaggaaaggccatgtgaggacccagagagaaggcagcgatttgccaaggagagaggcctccgaagaaaccaaatctgttgacaccttgttcttgaactcctagcctccaaaattgtgaaaaaataaatctctcttgtttaaagtcacccagtttgtggtattttatggcagccgtaacaaactaatacaatatacattcttaaagttatttttgcaaggtataaaattctacattattccttctttccctgtgtacataagatatttaaaaatatataaaattctacattagacgttctgttctttcagcacattgaagatttcattttacactcctgtgatttctactggtgctgttgagaagtcaccatttagcctaacaaccttccatttcctcctgtggtcgctttaaatttttttttttttttttgggatggagtgttgctctgttgcccaggctggagtgcagtggtccgatctcggctcactgcaacctccaccttgcaggttcaagcaattctcctgcctcagcctcccgagtagctgagattacaggagcccaccaccacgcctggctaaattttctatttttagtagagacgagctttcacatattggccaggctggtctcgaattcctgacctcaggtgatctgcctgccttggcctcccaaagtcctgggattacaggcatgtttggaatctgctggcctcctctagttgtgatctggtgtctttcatcagttctggaaaaatttcaactactctctcttcagatctgatctctgtccccttctctctctcttttccttataggattgctaatttttgtttattttcagtggagatgaggttttgccatgttgcccaagctggtctcaaactcctagactcaagcttctcaacgtgctgtgattacaggtgtgagccaccatgactcatgactgttttaatactggtgtctgatctcccagcatctaaagtctgagccacaccttttctgttcttttgattcttattggtgtcatatttccctgtgacctgattatgtcggcctgatgattattgacctttgcattttttttttttttttttttttttttagtggagtctccctcttttgcccaggctggagtgcaggggcgtgatcttggctcgccacaacctccacctcctgggttcaagcgattctcctgcctcagtctccggagtagctgggattacaggtgcgtgctactacggctggctaatttttgtatttttagtagagacggagtttcaccatgttggccaggctggtctcgaactcccaacctcaagtcatccgcctgtctcggcctcccagagtgctgggattacaggtgtgagccaccgcgcccggccgacctttgcatttaactggggaatttcccctgggcctgagttgaatgcatggattccagggtctgtgtttgctttggttaggcacccctcagacacttccagttacagcctctccaaacatggttctggtttcttgttccttgactcatccagttatctacactgggggtgtcaacactgttcttgggccattctgaagccacaacttctcagggacttttttttcttccttatcccattctgctcagtgttgatgctgctacctttggagttgggacttggagttgggacagggacaggtttaggtctggctcgaactcactcagcagaaagcactttggggtcccagcttagtgaaaggagggtctttctttgcacttcctatctaagccaggccctggaggccacagtactgaaatccaatcatatgctcccagcaaacccgttgaagaaacaaccaccttttttgtgttcttctagccaccctgtttacactgcacattttacaggtgttatgtcctgtctttgcatttcatcagtgctttcttttaactttttatttggagagaattgtaaagtcacaagttgtcataataaataatggagatcttcgtgtcctttcctcagttttccctgatggtaacattttccacaactgtagtacaataccacaaccaagatatagacatcgatacaatccactgatgttgttcagattttacacttatttgtactcatttgtgtgtgtgtacttgttttttgtttgtttgtttgtttgttttttgagagagagtctcgctctgtctccaggctggagtgcagtggcacgatctcggctcactgcaacctccacctcctgggttcaagcgattctcctgcctcagcttcctgagtagctgggattacaggcgcctgccaccgcgctctgctaatttctgtattgtcagtagagacagggtttcaccatcttggccaggctagtcttgaactcctgacctcgtgatccacccgccttggcctcccaaagtgctgggattacaggcgtgagccactgcgcccggccaataaatgtatttttttaaatgactaggtacctcctgagaaggatgcagctccatttccctacagttggaagctcattggttaagagaaagaacagtgaagagaaaatggggttgagatggccgcagctttctggagagtaaagctgagtggtcaattacttctggccaactgagggccctactctgctccaaaccgaaaccataatcccccactgtggccactccaactctagccagtaactcaccggtctctttcggttcacgttgcctacctggaggtgcttgatctttccacctgcagggagagcagctgagaaatgccaaagcatgggtcctgttcctggcttgtctgtggaactacgggacacccatgtcttacctctccctcctcttcttccttagggatctgagcttctggttcagctgagagtggggtgaaggtcaagagggagatccccgatagtaaggttggaactgaggatgaggataatggtgaggcagggggctatgagaattggcactggtcatacaggtggtgaccaagaaaaaggacagagaaggccatagagatggaagaattgaaataaaacgagcgtgggggccaggcacggtggctcgcctgtaatgccagcactttgggaggccgaggcaggtggatcacctgaggtcgggagttcgagaccagcctggccaacgtggcaaaaccccatctctactaaaaatacaaaaattagccgggcgtggtggtgggtgcctgtagtcccagctactcgggaggctgaggcaggagaatcgcggaggttgcactgagccgagatcgcgccattgcaccccagtctgggcgacagagcgagactctgtctcaaactaaacaaaaacaaaaacaaattctggagagtgaaaaagatgggggggaaaatcaaaccaaggagacagaacacacacgaagacagcaagtgagattatacatgcacgtaaaaacagagatggacagagagagagggcgtgcaaccacgtggaggaggtgtggcgcctctcaacatctattccactctcctagcgcaccttcctgcgactgcagcggctggagggctcaaaactacgtttcccagaatgccttgtggctgcgcatgtggccggaggttaggttccaccaatcaggtgcctccgcgggaagcttgaatttcttaccgaagtaagctgggcgagaggcagcccgaaggccagtgcagatcccggcgagaggctgcggcggtggagccggctggcggcttcctgatcgcgcaggaggagcagcggttcctggacggccctttctgagcgctggatttgagaatgccctggaggctcagcctagattctgtttcttctgagaggctctgtgtcccttaataagtcctttttgcttacactgtcccaagtgaattctgttcgcgcctctgagcaacgatgggtacacagacagggagaaatagatgcagacacggacagagacagggaaagtgattcagggagacacacagagaccccatccctgcgaagagacaaggagaaagacaattctgcagaagtggggtggagatgcaggaaaaaaaatcaatgggagaaggaagacctggttagacagacactcagagaaatacggaagataacaggcagagaggagtgagaggcaagggcaggtgggccagaaacagggacacggagacctcaccagaatgctggcgtgaaggtgttggttgagaggcctcattttaaatatttatttatttatttatttagggacggactctcggtctgtcgcccaggctggagtgtagtggcgcaatctcccctcactgcaacctccacctccgggttcagcaattctcctgcctcagcctcccgagtagctgggattacaagcatctgccatctcgcctggctaatttttgtattattagtagagacggggtttcaccatgttggccaggctggtctcgaactcctgacctcaggtgatccgcccacctcggcctcccaaagtgccgggattacaggtgtgagccaccgcgcccggccggagaggcctctttagagaacagacttctctgaaggcatggcagttgaaggcaggagaatggaggggactttggagaaatctctgacttgctagactctctgattttggtggcagcgagcatttgcctggcagaacgtctctttgtcccagcacctattcccagcccaaagcttcatcagctctgactgcggagggggtagtgcccctgaaagtgtttcccattctccatcacttgcccctgaggccttgtcccccaaaaccagcccccacttgacagcttggtaggagtgagaacagtgactcaactggttttaatgtgtgaggcagattccaggagtagtgactgactgaggaactaagaggagttgggggtggcgggagggacagaaggactgcaaaacagggacaccaacgaaaaaagagagggaaacgtagggacagaaagcagggagcgtgtgaggcagggaaagtggagactgagaaactaggggcagagagagggagggatccaggggctgagagaggggacagaggggagacagaggtggggggcagagggacagagaggaggggcagaggagggggacagaaagacagagagggggaggatgaacagagagaaggagacagaaggacagagagagggagacagagggacaggggggacagagggacaggatggggagcagagggacagagggagggaggatggaggaacatagagaggggacagagagatggggggcacagagggacagagaagggtgacagaagggcagagaggaaagggatacaggagttacgggcagtaagctgggcatgccccagttgggattccagatggtggacgcctcggctcctttaaccagttctcctggctttttttgttgcccctcagatttctttttgttttcctccacctaaggttgccaggtaaaatacaggatgcccagtttcatttgaattttagataagcaacaattcatattgtagcatacgtattgcccacatattgcatgggacatttttacacttttttttttttttgagatggaattccactctgtcacccaggctggagtgccatggtttgatctcagctcattgcaacctctgcttcttgggttcaaacgattctcctgcctcagtatcccaagtagctggaagtacaggcgtgtgccaccacgcccggctaatttttgtatttttagtagagatgggggtttcaccatgttggccaggctggtctcaaactcctgacttcaggtgatctgcctgcctccacctcccaaattgctgggattataggtgtgagccaccgcgcccggcctaaaaagttcttttaatctgaaattcaaatgccactggacacacagtatttttatttgctaaaccttggcaaccttatctccgtcactttccagtttctgcctctttttcattttctatttgtgtgtgcctgcctctccctctcttctagttcatctccaccatctctattctccttcctctgttttttatttttgtttgagacagggtcttcctctgttacccaggctggagtgcagtggtgtgatctcactgcaaactgcctccagggatcaagcgatccttccacctcagcctcccaaggagctgggactacaggcacgcaccaccacacctagctaacttttatgttttttgtagaaacagggtttcgtcatgttgtccaggatggcctcaaactcctgagctcacgagattctcccacctctgcctcccaaagtgctgggattacaggcatgagccactgcgcctggcctccccgtcccctcttaatgacctggctcctctcatgtgtagagacctctcttgagacacccccaccaggtccctgcctaggccccttcctccctccttcccccttcccagccctctttctagggctgtctctgtgctccaggcaacttctctgtcttctttctccatctctcttctcattcagatcccccacctttgcaattctctctatactcccctcaccccctgcccagaggagaaggtttgggggctttgagggagctaggaatctcccattactcaccttcatcctgacctcatctcctttcctttccatttcctgggccagagacatcatgagggttttccaaagccacacagcagaacagaaacacccgccctgtccctccaaatcccttccaatttcccagcttcttggtggaaaattcctttactcttcctgaaaatggcctggcttggcaatgtttctgaataccaggcaatgcttgagggtcacaggccaggaccagaggcgcctgtggctcatgggatggtagacttttggacacctactatgtgctgagagtgagggatatggcctgtgggctgtaaatacaacaacagtgatgtgtcctgggcatcaccatatccctaggcccagaacacagtaggtgttcaataaatacctgttgaatgaacgaatgaatgagtggatggacacatccccagcaggtggagcctcatctccatgtctgccctcctcttcatccctatcgctcttgcttactttatcctagcctgagtcccccttcttccatccccctctgttgggcttgtccttttctggagtcctgttattgttatttttatcagctggagggggtctctggtgactaccatgcgctgagcgttttctctatgtcaggtactgaaggggtgagtgacatgtagaatccttctggaatattccagaaggcaagtacagctttctagggcgttttccagatgtggaaattgggagccagggagaggaagagaaagtgccttgggtcacaccagaatccaagcgtctggcctcaccccacccagcctccttggccttggtctcttgtttctctgtcattatctgccaagctgcatctctgacacctccaaaatgtaaggcaattacttatctttttttttttttttatgagacagggtcttgctctgttgcccaggctggagtgcagtggtgcaatcacagctcactgcagcctcgacctctcaggctcaagcgatcctcctgcctcagcctcccgagtagctgggactataggcatgtaccaacacacctggctaattttgaagttttttgtgagacagagtctcaaactcctgggctcaagcgattctcctgccatggcttcccaaagtgctgggattacaggtgtgagccaccacatccagtcaggcaatttttttttttttttttttgagacggagtctcgctctgttgcccaagctggagtgcagtggtgcgatcttggctcactgcagcctccgcttcctgggttccagtgattctcctgcctcagtgttctgagtagctgggattacagccacctgccaccatgtccagctaatttttgtatttttagtaaagaaatggtttcaccatgttggctggtctcgaactcctgacctcaagtgatccgcctgcctcagcctcccaaattgctgggattacaggtgtgagccaccacacccagccaggctagtaatttttaaatatttgctcaggggttgcaaacgtccagagcctaggcatgtgagataaatgagcagtgccggtcaggaaggggctaagcctctctgccctgggtgagtggcagtggctgccccaggccagcccattatgggcaggtggcaattgcaatcaaagctatcacatggcatttctcaagagggtcttgaaacccatgttttcaaaagtctcccaatgtttaaatgctggcaacaattccacaaaacactgtttgggtcaaatgaaattatgggtaccgcacctgcctgttggccgatggtttgcaacctctgaattcatttgagtcccacgtgtcaggttttgtgttaagaagaatttcccaattccagtagactgtatgctccaaaaagccagagatacctgggtctgttttgttcattgctttatcttcagcacctagaacagtgccttatgcatcataggtcttcagtaatcatttttaaaaaagtgaatagtgtatcgatccaagcataagccatatgatgtagaaataacaatttaaaaaatccccatgttacagatggggacctgaaggctcagaggagcaaaggactgagggtaacacagcagcacggggatctaaacccatagctcacctgactcgaaaacctccaccttggcctatcctgattctacctggcgttgtgtatttgcagggctgtgtgtggggatgtgcgtccaagacaaaagcctgtttgtgggactgtggctctgcatatgtgtgtggtggtggtggtgtcggttctcctgactggacactgaggccctggaagctacattttttttttttttgagacagtcttgctttgttgcccaagctggagtgcaatggtgcgatcttggcttactgcaacttccgtctcccaggtttaagcaattctcctgcctcagcctcccaagtagctgggactataggcgcgtgccaccatgcctagctaattttttgtattttagtagagactgggtttcaccatgttggccaggctggtatcgaactcctgagctcaggtgatctgcccgcctcggcctcccaaagtgctgggattacaggcgtgagccactgcgcccggcctctggaagctaaacttgagcacctgcttctcttcaatcacagttactccggatgctcaccccgtccagagagaacagtcctccctccccagctcccccatctgggaccatcctcaggggtccccccaccctcttcccctaaatgcccagagccctgggggaaagggggaaagaatttaggatgagggtggaggtgcagggaggagggagagggaaggggatgggttaagaaggagtgtgtgatgtcaagcaaaaaagacaacattagacacagatgctgagatggcgtttatcgcggcaaaaaaaggtgaagtcgccgaggggaaaggggtggggaaagggggtgtggtgggggctggggtgggggccatggaagctaatacatggtgcactaggtcacacaacggacactgggggtgggtgagtgggtggggtgggcgtggcccaggcatggcaatgtggggagtgggaggagacggcagtgcaccccagccaggagcttctggaggtggtgggcaggaggcgggcggcgtctctggtcgcagaggatggaaggaatcagttagagggggttgaatggaggcactggaggcatggccacattccaagaaatggaatgaaggagtgggacagcaggcagggggccagcctggggcctgggccttttaatctaaggactggggagaaccaagggaccttagaggtcctccagtcctccccatattccaagagggagaacaagcctggagaggaggctaccttaaggtcctaagaaggatttagcaatcggttctccaaagatggccctgcagcctcccctgtcccccattcttctgctaccctgtctccaacagagaaagggggaagagaggttctagctcctctgactccaccattatctcactgaggctcctcagggaaattggaggatgaatccatttcacagaaggggaaaacggaggcatcctcccagactacacctttccacacctctcccaccaccctgccggggaatctatgcaccccatccctctagagtaatactgatagcttgaaatccttagcgatggggacaggtgaggggacataccttaaaattctcccaaatcgacccgggatgtgggccatgcctccagtggcctgagatgccaacataaagaaaagaaaaatgactccccacgtcccctggctcaaacccagtacaaaagtgactatttacaatgaaggcgtggggagtgtgtggggggcacacgaaggagggggtcagagtgagcgctccatttgagggaggccacgcccctggacccgccttttaaagggacaaagccaaatagcatagatatttatagaggatgtcaatccccagggtggggcagaccctaggggtgagggatgggggtggggcatgggatggggtgcgggtggggaggcatgggtggtgggaggagatggaggaaaggtagcaactgcccctagcctcccccctcccccctgccggacacacagttttccgtgggatgaacacagaaagggttaatcaaaaagagttcgatgagcgagtctgacggtcgagtggggcgggctggagcaatgaggccgcaggtcccggtggccggtggtgatggagtcacttagaagatgagaggttggtggttttggggggagaggtggggtagggaaaggggtgggggagggggggttaggcagtccccccccagttatctctgggagacaagtgtcctggactggttgagaagggattaaaaaccagcagccttcaccaccatgaccccacagattctcttcccatttccctccctgccacccagcaatctccaatgcaacttgcaggggacactaagacagaccatacacaccagcagtggcgcccggagacaagccctctccaaccacggcgtggagacagctgaccacagtgcaaacggatcgcgatagcagggctgggtgttatcaccccagtaaaccagtgtccctggctcgcctgtgccccagcttgggtatcgcgatcccgttctccccatcgtgacatccagtccaggctttcaggacagcgagcccggtttccaggcaggtgcttgtcgaaggcctggctggctgtaccgacaggcgggcactcagtcagcagcctggacgccccaactgccatcctcatcgccactcttgttaatacttttgccactgcacagtctatcacagcctctaatcccggtcctgaaacagcaatcatccattcagggggactcctctcattttccaaacaattggccaccaatcaaaacaaagtaagaaggaggatgtgggatggaggaacagggaggagaaacagaatgaggggatattgaaggatttggtggtccagaggggagaggaaatacacctcggagataagcgacaccctggtgttccaagtagaggtccccaaccatctataggtcggcttttatcaacatccacttgggatacccataattcccaactacaagtccagggtaggcgttagggcagatagaaacggcaaaatcattgtcttctgatcaccacccctactaattattgcagtgaagcctccttgcccatgtagaggtggctgggacagggcagaagaaggtggctgggcaggttggctcagagccccctgagatgggggatgaaggaggttaatttggcacatcgaaccccctcttctcataggagctttgaggtccttctcttgaatccagttggtaccgccccttgggctagcagaggaggagttgagcttgtctcctcctccccagtttccatagatttgccaggaagttggcaagtgggattctccttggctggtggaatttggggggacccaaaaggataggggtaagttgaaaaggagagcttttttctgtctttttttttttttcttacaaagattctaagaaaaactcagggtgggagggctgtggaagggggacccaatttagctccatgtccacacttttgcaatgcctcttagggacctcctcaaagagaaatggtcccatttcctcccctctatccaaggtcctctccccccagagcggctcagttccaaggaagtttggcacttttttttttttttaaatggggaaattggggagagagagttgagacatttgaggaaaggaggaagacagacaaagactaagatagagacaggacagaaaacaatgggaaccacacggaggaaaaaaaaatagaaagtcatagggagccagacaaagaaagggaggaagacacttggagaaggtatgggaagctagagggcaaatgagaaggaatagggagataatccaatgcagcaaacacttattaagcacctactgggtgctgaagagaagggtgcaaggaggccactcagagactctgagatcggattggctaatagggagacggggaaaaaaaaagagatgatgggtttttcaataatcctcatccctgaccccacatctgtgtcccctctggacaaactgcagcacaaaagattgaggtcagattgcagaagggactttcaagagatggcaaagatggtggagtgagtttcccaaggtaaaatggggaaaggtgtggctctctgctcaccaacatggtgagtgaactagctcactgagctagcaaagtatacctttcagatcaccctggctggctgggtagggggtccccaagaaatatgaatagggaggggttgttacacagacaccccaagcaaacacttttcaggaggcccagcctccggagatgtgtctgtgtgagaggagtcctggacccggctgattgggacccagactccagtgaatgagtttgtagaaagcggctgccaagcggaggatgcaaatgatatgcaaatgagttcattcagatcccacctccccagtcccagaccttacttcactctccctggctccttcccttcctcatagggtcctggggggctgtagggggatattccagctagatactgtaatactcgcgtgcgggtagagatactgtgaaatactgtaaggtcttttgagaggtggaggggagcaatggcccacagagccgcccccacctctaaccccaagagcccccaacggtagtagaagatatgtacaaagttacatcaagaattgttttggcactcagatctccatctgggttcagtctggagattaggggtggggcaacaacaatgggaagtgggggataggggaggggaagtggggcctgcctcccaccctggagatgacaagggcatggaaaaagtcaccccagtgcccaagttacagcctcccatcgggtggaagggctggggtgggaaattcagtgcaaggtacctcgaaggctattgctttctagggattttcacattttgatttgggggtggctctctagcaagggagagggatctcctaggctttaggggcaggaattgtctctgtggcttttcttccctccttttttaggagagagacaaggaggctggatttcccccaaagtcatagagaagaaaagggtttggaagacctaggaggcggacaaatgggggagagggtgggcatggggcgcccctcccccagagatgctgatgatggaaccagggcactgggcgccctgctttgggttggagaaagtggaggtggtctccaaggaagagagggagatgggtgggggtagagggaggtctcagctatcctagtctacatggttgtcaggccctgaaatctcagtctgccaacaggtccttagagctgaccacagccacagcactcagggagccactcctaaaccaactctcaaggccgcctggcttgtcagactccatcagaacattctagttctccagagcccctggtgagcacaccaaaacattctgatccatcagacatcaccgaagtatgccagcttgctggaagccaccaaaccaatctaacctatcagaccacacgaagcattctggcccaagggaccctactatggctcactgaactctacacctggccatactggcctgacagagccaccacacacttggctcacccgattcaatgaaacaaagccacgcagacacaggcatgcacacaaaaggcaggggtgggaagggaggtctttaacagtagtttgcactaggtccatctcccacccctccctccagggcgagttcgcagacttgacgtgtttgaatggagatgaccctgacaatattggtttttttccgttagagtcctccagattggatccaagtcccgtgccttattctcttcctaggaagacccccaggccaacacccaccaaagaagggtgtggagggagaaggcaggtcagagactggtcactgtccaatacaggaagtacatgcttcagcctaatgacatcacaggacgtgacctctaggcatcaccggaagtacaccttcccatgatatcaccaaagtgaccttcaaggaagaactcattgagacatcacaggaagtacctgctcccttatgttcacaggaagtaacctctgaggaactgcttcctgtgacatcataaggggtgcccagaagcaccccagaaagtactcagtgacatcacaacagagaccctcattgccattactctaagccatcagagataccacaccaagttgatccagcctcttgcaagtcttgcccacaggactggcccaatcccagagctggcatccttcccagcagcactgtccctgcccccccatacaacctgacaacaaaagagtgaacattcccacctaggagggacagctccagtgggaggagagtagctgagaagatctgggaactctggggtccttgctccaaatgccccatttcagctcagacgcctctgctacctctactcccatggcttccctcagatctagaactgaaagcagagaggtggggtgttgtgttttgggaaggcccctcattctgggtgacccagaggctccctcccctcctcccatatggaaacaaaaacttataaagggggaaaaaatccttaccaaaaaaaaaaaaaaaaaaaaaaaggagggaaagaaagagaaaataacgctttgttttctattaaaatcaacaaaatgcaatatatacagatatcacacagacctgggccctgggacaggaagggtcaggcccagccaagcacagggagggaggaaggaggggtcagttccgggctggggagggggcttctgagcccccttcccaaccgtcactcaatcctgcctatgactaccagaaggggagggtgcagtcgggcctaccccagccccatcccaagaggagcaggactacaccaagctgaggtcaggagttgggggggaggaggagagggaagaggaggagatgggaggagagaaaagggtgggagcacacaccacaggcctcatcccactttctgggggtttgaggccctcactccctgctcgtaggtgacccgctgactgatgaggtattgagcggcttgcgtggccgcggggctgcccgtgatggtgacccgccggttccgcgtgcctggcaggaactcgcccttcttggagatctggatgcgagcgcccgtcagctcctggtactccaccaacgtcttgccccccttccccaggatggctcccaccaggttctcaggcaccgcaatctccaccagctccttggcactctcagccgccagcttctccgccgtcaggaagcccccggccgccccggccgcggctgcagcggccaccagcgggccgccccctccgcccgccccgccgcccgccccggccccgaggtagccgttggcggctgcggccaacgcaaaggaccccagggctccgggaggcgggggcggcggcggggcggcccctccggctggcccggccccggcctcgcccgcgtaggatgccaggaggttggcggcggcggcggctgctgggttggccccggcggccacggcggccaggacgccggaagctgcggccgagttgaggcccaggcccagggagttggtgttgtagccgtaacttgccagcgtgttaagcgccgtgctgatggccagcaggtcggtgcctgagaaggcgggcagcgcggcgggaaaggcccccacgccagccagcccggcggggcccagcaggccggaggcggcggcggccgacgctgcggccgcggctggcagcacatccgcggggctggcgtacggagagccggtggggttggagttggccacggggcctgccacgttggcgtagctgatgttgaggcagctgctgctctgggggtcttcttgtaccttctgcacgatggcgctcacggccttgtgcacctgctcgggctcgccgctgaccgtcaccacgcgctcctgcaggttgatgccctccggcttctgggacagctgcacccatgctcctgactgttccatcacggctttcaccgtggcgcctcccttgccgatgatcaggcccgccgtgctgttggggacgatcagcttggcctgcgtggggagcaaaagggagggtctttaattttatttttttaaaaaattaaattaaattaggctgggcacggtggctgtcgcctgtaatcccagcactttggggggctgaggcaggcagattacttgaggtcaggagttccagactagcctggccaacatggtgaaactccgtctctagtaaaaatccaaaaattagccagctgtgtgttggcacatgcctgtaatcccagctactcaggaggctgaggcaggagaatcgcttgaacccaggagagggaggatgcagtgagctgagctcgtgccaaattgcactccagcctgagtgacagagggagaccctgtctcaaaataaaataaaataatatatatatatatatatataattttgtctatctatattagtagagatggggccttgcgatgttgcccaggctggtcttgaactcttggcctcaagggatctcctgccttagcctcctaaagtgttggaattacagatttgagccaccaaactggcgaagggagggtctttacggtggctggagactgagacgccccaggtcattccctacccctcctctccagcatccaaaatcaggcccagcatggccttttgatatgcaccagtatggtccaactggttgttaaaaatattgaaatatttcaggtcaggtgcaatggctcaggcctgtaatcccagcactttgacaggctgaggtgggaggataacttgagcccaggagtttgagaccagcctgggcaacatagcgagatcttgcctctaacattaaaattttttttaaaaaaattgaaatatatccacaatggttggttaatgaatagccagtatttgaggtcccctcagtagcccctcaaccaccctgtcccatgtacctgggactcttagtacttcctctgcgtccagcatctaaaagcttaatggctaatccaatggggccctccaggatctcactccaagcttgcacaatggcccacccatgccttctagtgttacgtactctgacttccagccctggaaaagccttcattaagccttactttacagatgagcctcttgaggcccaagaggtgaaaggacttgtcctaaggttccccagttagtgacggagctgaaatctaggctcttgggttcctgatccattgtgctcccctagacatggtcttctcgttgaactctctgttgttatgggctgacactgtgtccccttcaaattcatatgttgaaggcgtaacttccagtactttagaatttgactatatttggagagagggtctttaaagagataattaaggtaaaatggggtcattagggcgggccctaatttactgactggtgtccttataagcagaggagattaggacacagatgcacacagagggaagactgtgtgaagacacagggagaagaaggtctaggagagaggcctcagaagaaaccaaccctgctgacaccttgatcttggacttctggcctccagaatcatgagatataaatacctgttgtttagaccacccagtctctggcactttgttatggcagccctagcagactaatctagttgtcctgtctgtaaaatgaagataacatgaaggcttttgtctgagaaggcagacgtaagtggatgtcttggatgtcacacaatggatcgggaacccaagaatctagatttcaatctccttctaattcctgggacgggaactctccaggatgaagaagttggtcatttgaatctggtgacctctcctttctcagttgcagagcagccatccttcaaccacccatttgtccaagcatctgcaagtctgatcaatcttaattcctgtggagacatttcaaaaccagtcatgtccttttgcacctccgagagcatttctacacataaattcctccctctcaaaaatccttcccatgtccccttaaaccctgggggtgtctgagaaatttgtgggggtggtggttttggttgttgcaaggactgggggaagatgtggactgtcagtggggaggaccataggtgtctgtaccccacaatggagagtcagtccctcacaagaaagagctgtcccaggccctatatgtctacttttttttttttttttttgagacggagtctcactgtgtcacccaggctggtacacagtggtgcgatctcggctcactgcaatctccacctcctgggttcaagggattctgccacctcagcctccctagtagctgggattacaggcgcccaccaccatgcccagctaatttttttgtatttttagtagagacagggtttcaccatgttggccaggccagtctcgaactcctggcctcaagtgatccagccacctcagcctcccaaagtgctgggattacaggtgtgagccaccgcacccagacactatatgactacttttgaatgtcctgttggacattcatgctgatgaagagcctgtttttaaatctctgagcccacgtctgggcacggtggctcacgcctgtaatcccagcacctcgggaggccaaggtgggaggatcacttgagcccaggagttgtagacctgcctgggtaacatggcatgaccccatctctacaaaaaaaaaattaaaaacattagctggcctggtggcacatgcctgtagtcccagctactcaggaggctaaggtgggaggatcacttgagcctgggaggtataggctacagtgagctgtaattgtgccactgcacttcaacctgggcaacacagtgaaaccctgactcaaaaaaaaaaaaaagtctctgagcccagaacccaactgacacagtgagaccctatcccccccaaaataaataagtaaataaaaataacaaaataaaaaaaatctctgagctcagagcccaaccccatgacacatgtaagtaccaagtattgtttgcatggttttaagagctactgaaatttccaggaacgcaactaccagtaaatcaagagcagattgtgctttgttttgctctgcacttcactaaaagttttcatcattttagaaaacctggcgtcagtagcaacagcatttgtattatttaagtctccagtattatactctggatcactttacatatgtagttgtctcacttagctatgcttaggtgtgagcagctgcctaattcattattccttctattgtggtcctgactatttatttacatattaaaattcaccttggctgggtgcagtgactcacacctgtaatcccggcactttgggaagctgaggcagggtgaatcacttgagcccaggagttcaagaccagcctgggcatcatgatgaaaacctgtctctagtaaaaatacaaaaaatagccaggtgtggtggcatctgcctgtggtcccagctacttgggaggctgaggtgggaggatcacttgagcccaggaggttgaggctgcagtgagctgtgattgtgccactgtactccagcctgggcaacagagcagaccctgtttcaaaaacaaaacaaaacaaaaaacaaaaacaacaacaaagaagcaaaaaataaaattcatcttgttttataacaaatcaccttccttttatttcttctttatttaaaaaagtctcgtgggataaataaaacatggtatatccatacaatggaatattacttggcaatacgttgaatgaacaaagtactgatacatgctatagcgtggatgaatctagaaaaaattatgctaagtgaaagaagccagttacaaaagaccacagctgagttcatttacataaatgtccagaatatgcagatccacagagccaaaaaggtagattagtggttgccagggaatgggaggaaggggattgggggtaactgcctacaggcataggatttcttttgggtaatagatactttctggaattagaaagtgttgatggttgaccatatactgtgtgattccttttacagaaatgtccagaataggcaaatctatagacacagaaagtagatttgtggtggcttggggttagggagagggtgagctgaggtgggagatcgaggggtcatagctaagatgatcaagatttcttttggaggccaggctcggtggcttatgcctgtaatccagcactttgggaggcagaggccagagactgcttgagcccaggaattagagatcaacctgggcaagatggtgaaacctcatctctacaaaaaataaaaataaattagctggatgcagtggtgtgcacctgtcgtctcagctactcaggagtctaagggatcacttgagcccaggagtttgaggctgcagtgagctataacaggtgccactacactccagcctgggtgacagtgcaagaccctgcctctaaaaaaagaaagaaagaaaaaaaaaaggatttattttgaaggcagtgcaaatgtttgaaaatggattgtggcaataggtgtacaactatgtgactataataaaagccaatgaactgtacactttatttatcatgtattttatgtttctctttttttaaatagggtcttgctctgatacccaggctggagtgcagtggtgtgatcagagctcactgcagccttgtacttctgggctcaagtgatcctccggcctcggcctcctaaagtgctgggattacaggcatgagcccccatactgggcctagagccgtgtaccttaaaagggtgagttgtatgtgaattatatctcaataaagctgtcaaaaagtcttacgggtgtagatatgtctatatgtgtatatatgaatatgaatagtatttcagagagtcaagtgaacatgacaaaatatttgtaggagaaagggggtgttgctgtgacagagctccccatgctctattccctgttggtctccctgactttattattattattattattttttttttttttgagacacagtcttgctctgtcacccaggctatggtgcagtggcatcatctcagctcaatgcaacctccacctcctgggttcaagtgattctcaagtgagccgagatcatgccactgccctccagcctgaatgacagagtgagactccatctaaaaaaaaaaaaaaaaaaaggccaggcatggtggctcatgcctgtaatcccagcactttgggacgctgaggtgggcagatcgcttgagctcacaagttgtacagcctggacaacatggcaaaacctcatttctacaaaaagtacaaaaattaactgagtgtggtggtgcatgcctgtagtcccagctacttgggagtctgagaagggaggatggcttgagcccaagaggtggaggttgaagtgagccaaaatggcatcactacactccagtctgggtgatcgagccagaccttgtgaacaagaaaaaggaatcttcatttattctagagtaaaagagactaatgaggtgtaacaatcaaatgcaaagcacgaatgttgactgaatctcagattgaaaaatcctctatagctataaaagatattttagggcaatttgaatatggactttccaatgagacaatagtatagaattagcatttttgtttgtttgtttttgtttttaggtgtgttgacagtaatacaataatgtaggagattgtccttggaagatacatgttaaagtacttaggagtaaagagtcatgaggtcagccaggcacggtggctcacgcctgtaatcccagcgctttgggaggccaaggcgggcggatcacgaggtcaggagatcgagaccatcctggctaacatggtgaaaccccatttctatgaaaaatacaaaaattagccaggcgtggtggcacacgcctgtagttccagctacttgggaggctgagacaggagaattgcttgaacctgggaggcggaggttgcagcgagccgagatcatcgcaccactgcattccagcctggtgagtgagcaagactccgtctaaaaaaaaaaaaaaaaaaatcacaacaaaaattgtgtgtgcgcacgcgcatgtacacacatgcatgcacatgtgttcatgcatgcacaaatgttaacaactggtgaatctaagtgcagtgtatggggactattccttaaacattttcaaaataaaaaggaaaaaaatctatgccctaacattcccttttcctcttctccgctttatttttcttcatagtatttttcactctctaacatcctctatattttacttatctccttgtttattttgtgtttctctgtaaaagaatttcaaatccacgaggttagagatttttgcctgtattattactgctgggttctcagcgcctagaaaagtgcctggaacacagtagatactcagcaaagggtgagcgaataaatagacggatgaagactgaaggatgacacgcccacaggcccaagcaggaaggcgaatgggtggaggcagcaggtgtatcttacctggtgggggtggggagtggtagagtactatgcaattgggcagccaaactaagcctgatggacattttccagatgagttggaaatgctgatttgtaaaatgtgaagcaccctagttttttttttttcttttttttgagacggagtttcgctcttttgcccaggctagagtgcagtggcgcaatctcagctcactgcaacctccgtcttccagtttcaagcgattctcctgcctcagcctcccgagtagctaggattacaggcacccaccaccacgcccggctaatttttgtatttttagtagcgatggggttttaacatgttagccaggctcgttttgaactcctgacctcgtgatccgcctgtctcagcctcccaaagtactgggattacaggcctgagccaccacacctggccagcatcctagtttttaaatgttggcaatctcttaaaaatgtctaagatttgtgtagtagaaacaatgcaatgtactagccaggctacccatttgcagtctgtgcatacaaatccctgaaaagctgccttggactctggagtcacctgcttgggtttaaatcctggctccctgtctgatgctgggcaagggacctaacctctttgagactcagttttctcatctgtaaaacaaggatattcagacctcctcataggactatgatgaagcttaattgagcttatgcatgtaatggtgagcttgaaatccaagcatgaccacaagtagctggaactgagagtgagtgcccttcaggtgactcacaactgctaccattggcagattacacctcagtccctatgtttctgcttggccctgtgggtgaagtcatcacctattcattcaaataagtgacatgtgctgagcacctactatgtgccaagcatagggcatcatgtatgtgtgcaattaatataagccatagaagcactcaagaaatgattattgtcagccgggcgtgggggctcatgcctgtaatcccagaactttgggaggccaaggtgggcggatcacggggtcaggagatcaagaccattctggctaacacggtgaaaccccgtctctactaaaaatacaaaaaaattagccaggtgtggtggcgggtgcctgtagtcccagctactcgggaggctgaggcaggagaatggcgtgaacccgggagggggagcttgcagtgagccgagattgcgccattgcactccagcctgggggacggagggagactctgtctcaaaaaaaaaaaaaaaaagaaaaaagaaaagaaaagaaaaagaaatgattattgtcattgttatccccatggatggagctggatttaaatcccacatctgcggtacagctattatggaaaccagtctggcagttcttcaaaaagttgaacatagatttatcatatgtcccaacaattccaccctaggtatctacccgagagctggaaatatatatctacaaaaagacttgtacatgaatgttcagaagcattactcatcatagctaaaaaggagaaacaacccaaatgtctatcaactgatgaacagacaagcaaaatgtggtctatgcatacaatgaaacattatttgtctataaaaaggagtaaagttttgacacatgctaaactatagataaacctcgaaagtattacatcaagtgaaaaaagctagacacaaaagaccatatattatatgattctgtttatataaaagatccagaataggcaagtccacagagaccaaaagtagattagtggctggaagacgttgagactgggatctgggggaatggtgagtgactgctcatgggcacaaggtttctttttggcatgatgaaaatgttctggaattagatggtaactgatgtacgactctgtgaacatacaacaaaactactaaactgtacacttctaaacagtaaagcttacagtatgtgaattatagctcaacagagctgttatttcaaaaaaaaaaaaaaaaaaacaccaggaaaaacaaacagcctgacaaatcaagaagatggaacagcatgttcacaaccacaaccaggagtggtatttagtctgtgatgcagtattttagagcagtgaaggaaggatagattggccaagaaaaggtttgaggacaaggggttaatcatgtgggaaaaataaagttaggttttaagaaaatttctacctcttccacctcctagctggtggcctgtgaaagtccctttacttctcagagcctctttttccacatctgtaaaatgggcatactattcccgatccatacgatttgtgcaaatattcagtgagacactggaagcctgctctctggagtcactcagtcagcagggttgctgtttctacaacacagcaaggtccaaatcgtaggttgtttttttttttttttttttgagacaaagtcttgctctgtcagccaggctggagtgcagtggtgcgatcttgcctcactgcaacctctgcctctcaggttcaagtgattctcctgcctcagccgctggggtagctgggattacaggcgcctgccaccatgtctggctgatttttgtatttttagtagagatggggtttcaccatgttggccaggctggtcttgaactcctggcctcaagtaatccgcccacctcggcttcccaaggtgctgagattacaggcatgagccactacgtccagcctcctagtttattctttagtaactgtgtgaccttaggcaaatgccttcacctctctgtgccttacctttctcatctccagtattagcataaccacacctaccctatattattattggaaacattctttttttttttttttttacagtcttgctctgtcacccaggttggagtgcagtggcgcgatctcggctcactgcagcctccgcctcccaggttcaagcgattcttctgcctcagcctcctgaatagctgagactacaggtgtgcaccaccatgcccggctaatttttttgtatttttagtagagatggggttttgccatgttggccacgctggtctcgaactcctgacctcaggtgatccacccacctcggcctttcaaagtgttggaattacaggcatgagccactgctcccggcctgttatgggaaacattcaatgactaaagtgatgcccagtgcctggcacatgggaagcgctaagccaatggcagctgccttcatgatagaccctgaattgtagaactacagcatcttagaaagatctgcagatgcagactcatagaatcttggaatcccaggacattagaacagtagaatcttagataatacatgcttagaatcttggaatcacagagccatagaactgttgaagttttagagccagaaggaccagagaccatctgccccagtgatttgcaagcccatggaaatttgcaaatactactactaccaccaccaacaataacaacaaaagcagcatcaacagctaacagtttaatagagtaacttatctaggttccaccacaaccctaagataggtgttattattaccccattttctagattgggaaatggaggcacaaagaaagaacttgcacaagttctttcacaggtaatgagcagtagagtcaggatctgatcccgggccagagtttatgctcagattcctaagccttaccagaaatattgattcagtggttctggacaggacccatgaatctgcattttaagctacccagatgactcagatatcagctaggggtgagagccactggtataacccagaagtggcaatctggtgatcctcaggccccagtcagcctacagccatacatgtttttttgaccttcatagtgttttaaaagcagagttggcctggcgcaatggctcacgcctgtaatcccagcactttggggagctgaggcgggtggattgcttgagtccaggagttagagaacagcccgcaacatggtgaaatcctgtctctacaaaaaatacaaaaattagccaggggccgggcgcagtgtctcatgcctgtaatcccagcactttgggaggccaaggaaggcagatcacctgaggtcaggaattcgagactggcctggccaacatggtgaaaccccatctctactaaaaatacaaaaaattagccaggcatggtaacaggtgcctgtaatcccagctacttgggaggccaaggcaggagaatcacttgaacccgggagttgtaggttgcagtgagctgagaccaggccattgtactccatcctgggcaacaagagcaaaactccgtttcaaaaaaaaaaaaaagaaaagaaaaaaaaattagccaggcgtggtcgtgttcacctgtagtcccagctattcagtgggctgaggtgggaggatcgcttgagcctgggatgtcgaggctccagtgagcctagatcataccactgcactccagcctgggtgacagagtgtgactctgcctcagactaatatatattaaataataataataataaagcattttaaagtcagttgatctaaaaaatttatggcttcttttgaaaaatttggaagatgtggtagcactatgttcatgttcccaaagtgcaataattcggtggatttgagtggcagcttctccctttaaagatggcataccctctccagagagcaacaaccctcaaggcttttgttacctttttcaatactttagttatttaatttataatccctggtttggcccagctgctgcactgtaataaaagagaaactgaggtctacagaaggaaaggggctctgagtaacactgcaagtccaaggcagaaaagaagtagacctgtttcctgactcaaaaatcccataataacaacagagaacatttttggggctaactttctatgcattatacacataagctatgtgcttttcaaacatcaacgaacactaaccatcacccttaaggaggcatcataatgaatctcattttacaggtgagaaaaatgaggattggagaaatcaaagtcacttgctcaaggtcacataggacgtaagtactgtacggagaaggattcaactaaacaacagagcccagagcctgagttttcagctatgatctccctcagtctttggaacactcgagtaataaggcagggaataaatcctggttctataacctttcgactccactgtctcagagctcctgtggattagggggagggggtagaaggctcaggcacagatggtgctgaccccattttccttgcaacattcacaaactcctgatgaaccctgagtcccttgtggccacgaccaaggcggagggaagaggcaatgccctcgcctccctgtaaactgtgaataacttgtgcgctgctggtgggaagggattcgggagaaacctggcggggagcgaggagcttcagcaccaaggacagcgtccgcgctacacgccccaagccctgcggtcttttttgggagcgctccaccctgcagctctcctccaggcttctccgcccaccatttccccatgagcttaggggaactcaggcctgtgctctgccccacctcagggcaacgacaggacccaagaattccagattttacggactccctctctcctgtctttgcctctaggtagacgttaacgagccctcgcaaggggccctcccgtcagcccaggggttctcgccccattgcacggagtacgcatgcataggggagtggggacgggagagaaaacgggagccagccccgcgtttccgttcccttacgcacttccgggtccggacagcgctgcctgcagctttgaggggagcccacctgccccgtgagcgccgtcgtcatggcaaccggacaggcccgggaagcgattggccactccctgccacgcccctatgccactgcttccccgtaactgaggcaacggaggggcgctgccttcccccttccattccttcctggagagggctgtgtaggagagggacccacctcttctctcgctaatgaaacaccacctctacccccatacgttaattatggagggaaggaggatgagaggccatttgtaaactcttctggatgtggctgaactgtcactgaggtcacttccggtgatagcaggaagtgggaggcaggtcgttcagagagacaatgggatgaggtggaagagagaagaggaactagagaatcctaggaagaaaggatcgaacaatagggaatcatgccacattctcccagaccttcactccctctctgaatcaagcccactctaaatgttctggagtcctttctattctattagagctgactccctaaaaataatactaaccactaccatgtggtctttgactgatgagatttttatcagctttgtcccattgaacctcacagtaagcagtgatgtgggaggaatgtttctttgtgaatgtcaacagctttacagcaacccagtctctgccccagctgacctgcttggctctgtcggggttcatcgtggtttggggttgaaggatgttgaccacctcaggcttggtcatcgcttgtgggatttctcggaccttctcggcaataaagctgtgcacagcattcaaggcctctgccgtgccctgtactaggcatacccgctctgtggttcctgttgagcaagggagagagagggcacactcatgagacaggaatgggaacattcctgagagacaggccccatttaatggaagaggcaagctgaggtccagagagtggacctgactgatcacacggtgagcctgggggagcgggcatgggctggcaggccatgatgggcagctgggagaatgagtgccatcctgttttataatctgcacttcatctccctcccctaaaacaacctctagggatggaagaatgatgcttaaatgttttgcgatgcccacagcagccctgggcaggggagacagggctcagctgcctcttctcagttcttgcggttccctggttgctttggcaaccattcactcactccgcccccctccccttctggaagcagagagctcaggcctgcaacggttgccacagtaactggaacccccttatcggtctggctggccgggtcctcagcccacccccagggggacgagggacgaggccctgttgtcatggcaacccctgaaagcctgcagcgttggcctctgggctttttggagaggatgggggaagagctgggggatgggggaggcagaggagaggcctgagtgcctgtctgaacccaccagatggagggctgaggggtgggggagggcaggggtgtggacaggggagagcagggtgggtcaaagactgctcatggaggagtgaggaccaaggaactggggagggagggtctttcctggagattctccagatactggctgtggctctgtcctgggcatccttctcatttctgcatgagagtgttagggagtgggggcacgggggagagagaaactggggggtattgggatatgtgtgtgaaagagattctgggtgacactgtgaccagtgtgtgtgtctgcgaggctggtgagtggtgtgtgtgtgtgtgtgtgtgtgtgtgtgtgtgtgtgtacttgagcaggactagctagatgatcctaatctgtgtttgtagaagataaagtgcagagactgccttatgaacagactatgtgacacagtgattccggtgaagatgttcgtgcgtgcccttgtgtgtgggacagactttggtgtcgctttgatgatgaaggttatgtagactctttgtgagacagagctgagtgtatgtgagagtttgagagaaagaaacaaaagaatctcacaaagtgggatagaggctacacaatgaatatataccactttgagactggatggcagtgtatgtgtctgcatttgtgtgtgtacgtgtgtttgtgaaagtgaaagagagacacacttctggatgtttctgagactatttggatgaccagtgtgaatatacacatatgtacaggagacaggaaagaccctatgaccagtgtgtgtgaacctgagaaggagagacagacaggtagactcaggtgtcagtttgtaggactttttggatgactggtgtgtttgtgtatgtgtgtgtctgaacatgtgaattacagcgagacaaagaaaacttgactggtcagtgtgagaatgtgcgtgcctgggtgagccgggatgtgtgtgatgcgtggagtgtgagtgtgtctctctctctttgaaggggattctgcccctgagaatgtaaaaggtcttgagtgtggccgggtgcggtggctcacgcttgaaaccccagcactttgggaggccgaggtgggcagatcatgaggtcaagagatcgagaccatcctgggcaacatggtgaaaccctgtttctactaaaaatacaagaattagctgggcgtggtggcacgcacctgtagtcccagctacacgggaggctgagacaggagaatcgcttgaacctgggaggcggaggttgcagtgagccgagatcatgctactgcactccagcctggcggcagagcgggactccgtctcaaaaaaaaaacaaaaaaaagaaaaaaaacaaaaagtgtcttgagtgtgcaccaggcaccgtgtggctgtgtacctgtgtgtctgggatacctggggtgtgtgtcagtgtccagcaagcacttcagtgcagcacgctggtgacacgaccctgactcctcaattgccatttcccagtctggcaggccagcctcgccatgtgtctgggcgtcactgtctgtgggtcacttgtgtagctgacatcccccacccgctttgggccatgttcctcactcttactacccccccttccccaccccagaacaatggcttggtctgagccaagggtgagtcagcctgcagtctgcctccgtctggtgtaaataggaaagggtgtgggttggggtgggaactggggggcggggtagggggaggtggatgccccaggaagagctggccgagggtttgcctctctgtgaagcttccttccaactcaggaagtctttgaccttccatccccttgtagtttttacaagggggcccacaggggcttttggggaggttggttaagccccacaagagtgtctaataatagctgacccttatacaacccaagcctcaggcaccattctaagcactttttttttttttccctgagacaagagtctcattctgtcgcccaggctggagtgcagcggtgcgatctcagatcacggcaacctctgcctcccagttcaagtgattctcatgcctaagcctcctgagtagctgggattacaggcgtgtgccaccacgcccgtctaagttttgcattttttgtagagatgggatttcaccatgctggccagtctggcctcaagtgatccacccgccttggtctcccaaagtgctgggattacagatgtgagccatcgcacctgaccaaagcactttatacatacgtgttcacttaatatatgaagtaggcaatattattattgtccctgattccctgctaaggacgccgaggcacagagagggctcaagatgtgttcaagttctcttagatggtagtggatgttcagagatttgaacccaggtgtctggcttcagagtctgtgcattctgctaaatttggggtgcatggagtgatcagctctatgtgtgtatcttggagggaggcataaaatgatgacagttttatttttgtatttttgatattaaaaagaatatgaatgtattaagtagtcattcaagagtatgcacgttgatagaggtatgttataaaactataaaaatgttttttgaagtgtgtgtggtgggacacagtggctcatgcctgcaatcccatcactttaggaggccaaggtggatggagggcttgagctcaggagttcagcctgggcaatatagcgagaccccatctctacaaaaaaaaatatacaggccaggtgcagtggctcacgcctgtaatcccagcactttgggaggccgaggcgggtggatcacctgaggtctggagtccgagaccagcctgctaacatggtgaaaccctgtctctactgaaaatacaaaaaattagctgggcatggtaatggacgcctgtgatcccagctactcgggaggctgagacaggagaatcgcttgaacctgggaggcggaggttgcagtgagccgagatctcaccactgcactccagcctgggcaacaacagcgaatctctgtctaaaaaaaaaaaaaaaagtagctgggcctggtggtgcacacctgtagttccagttactcaggaggctgaggtgggagaatcacctgagcccaggaggttgaggttgcagcgagccacgatcgtgccactgcactccagcctgggtaacagaggaagaccctgcctcaatataaataaataaatacaaaataaaaagtgtgtgtgtgtctgtgcttttcttcagcagttagggtataaagcttcaagcagatgttcaacatcagacggtgttttagaatccctagggtggccggtcgcggtggctcaagcctagcactttgggaggccgaggcgggtggatcgcgaggtcaggagatcaagaccatcctggccaatatggtgaaaccctgtctctactaaaatacaaaaacataaaaataaaaaaattagttgggcatagtggcacatgcctgtagtcccagctactcgggaggctgaggcaggggactcgcttggacccaggaggcaggggttgcagtgagccgagatcacgccactgcactccagcctggtgacagagcaagactccgtctcaaaaaaaaaaaaaaaaaaaaatagaatcctcagggtggatctgggctgacgcaagggagtctgtgtggcccttgcgcaggtgcttgcctttttctgcatttcagttgctccatgtatgacctggatggattgaatctagggctttgggatccaccacaaaggaggggaggttgtgtgttctgcccttctcttggagttaagtgccaggtaggtttttatttcatgtagtagacacccaagtgctgtgtgtgtgtgtgtgtgtgagagtgtgtgtgtgtgggagcatgtgtgtgagtggggtgtgtgtgagtgtgaatgagtgtgagagcacgtgtgacaatgtgtgtgtaagcgtgtgtgtgagtgggatgtgtgtgaatgagtgtgagtgtgtgtaagcatgtgtgacaatgtgtgacagtgtgtgtgactgtgtgtaagcgtgtgtgtgggtgtgagggtgtgagtgtgaatgagtgtgtgtgagcatgacagtgtgcgtgtcagcgtgtgtgagtgtgagcgtgtgagactgtgtgtgagtgtgcatgtgagagtgtgagtgtgtgtgcatgctaacctactaggcccagagtgccctttcagtttctccactgtcatttctcacatgttctgtctgctttggctacattgaccaaactgctcagcagcctccgagtatgccattttgtcttcctgggcacacttccctgcactttacctcgctcatccttccctactgctctggtcgtctcttccaggaagctcttcctgacctccctgggctgggtcctttgtgccacttgggctccaactaccaacctctggacttcctgtcccagccctgaccactctgggtcatcactggtgtgacgtctgcttccctgactgggatgtgagaaccaaggaagcaaggctgggacatttcagccactgctattgtccccatttctgtctggcaccgggctggcatagaggaagtgctcagagaatgtgtgttgaatgaatgagtgaatgaatgaatgacagggtgtcacgccaggagtggagggaagtgttttttgtctcctgcagtagcttttccattttcctacattcctgtgggatgtaggactaggatgtagggggctgtgtcctgcttctctgagtcagcagccggctcatgctgtatgatctggaagttgcacgccaggagtggggatgggggctgaccacatgtccaggggctgaggagagacgctggctcctgttgcttgtctgaatactgtttgacctggtaggaccaatgtctgtcccgccttctgggtttcccagctgcctggcctgtggggtgtgtcaatgggctgggaggggacgacatgtctcgtggcacagaatgtgatccaggagcaaggaaccaagtgtcctcggaggaacattccgaacagaggtcttatccatatcttgtgggctacaggggagtggggaaaactgggccagggtggaagagaaaaggaggaggtgtgcctggttcactcgatttttctctaaacctcttgccaaagctgcttagtgagatgggaggctgggggcggggtggatggtggagagagagagagagagaagaggagagaagatagagcagagagagaatgagagagaaagagggaggagagagggaaagataggagagaggagagacggggtggggagagagagagagacagagagggagagagagagagagagagagaaagagagagagagaaaatgagtgcgtactgaccctgggctccagctctggtgtttgacctaaaaaatccaaggggattaaggatgaactagaaccagcactggaccaaagatgcaattcaggaggccttccctggagtcctagatgtcgatgcttgtcgggcattggtcttgggagggagatagggagaggtgagagactttggagggaatagagagagtggaggggccttggaaaatgtatggttgggggagaaggatggagcagggggagaggcagaaaagggactgggtttggaggaagggaagaaaaaaccaggagggagctgagacttaggaaaaaagagacacaggaagggagaggcagaaagaaatgtgtgacgcccgcagaggaggacctcagtgagagggggctagtagatactggttgaatggatgattgaacagagttcagagagagagaggaggaaaggaaaaacgtgagactatgagaggtggagggaaggaaaggatggggagagagacaggaagacaaaaggagaaggaaagatgaggggagggacagggaaagcagaggacagatgaagaggacaagagatggggggtatccaaacagaaccagagagatggacagagaggcagacagaggggcaagagacagagggaggcagaggggagcaagagacgagaagtcagaaacagaatgagagggagacacataaagaatgacaccgagacagagaaaaccagtgagactgggcaagagggggtgacagaattccaaaggggggagcaagtgtgtggaacatggctggctggcccccaagcccggagggacgccctgacacctgcctccctccccaccctcgctcctccaactgaccagagggggcaggtgtgtgggaaaagacacatctgccagcgcatcatgcaaatgagctcatgaatatgcagcaggcccgttgtcttgccctgcccccacccccatctgctcggccaggcccctcgggctgggggcagctctgtccccttaggggaaggggaggccccctccccaccactgtcactgtccttagggcagaccttccccctcatctagggcccaggtgggagggagaaagggaggaagggcggggggcctagggcagagacctgggccggggctcaccggggtagaagtctttggacttggagagcttgatggtggctccggtctccttctgcagctgcacgatggtctgcccgcccttgccaatgatggagcccgccgcgtagctggggatcagcaccttcaggaagtattcgccttcctctgcgggggcacacagggtggaggggagtcagcgggggaggggtcttcacctttggagggggtgagcagaggaaaccccaggggtcacagtagcagtatggagaataatacaaataatgatcttcattcactcattcattcaacaaatagttattgagcacctgctacgtgcctggcactggtctagggaaacagccaagaagaaaatagacaaagctccccgatttgtgggcaaatgaggcaaataaggccgaaagagttttagtgattcagccaagagctcgcacagctagctacattcttctaggtggggaagacagacagtatatttcatgtcagatggtgggactcctgatgacacaaaaaaggcaggaaaagggggtcagggagggtgggaggctgcagtgtcagagagggaggccagggaagctcttcctaagaatgtggcaggctttattcatcatcacacacttttgcagcacctgataggtgctatactgttctaagtactttccaaataccagtcctttgaattttcacacttatcctatgaaggaacccatcatacagatgaggaaacaaaggtgaagaaatcacccaaggacacttgtaggtggcagagctgagatttggagtccatgctctgaactattatgatcatcaggatatggaggaaggaacggaaccacatggctatgtgaaggacgagtgagtgcaaaggccctgaagtgggactgtgcctgtgctcttccagagggactaaggaggcccctgtgcctggggctgaatgagagaggggaagaatgggaggagatgaggacagagaggggtgctggtggtgaggggtgatggggctcgcaggccacagtgaggtccttaacttttaccccaagtgagatggagccatgggagggatgtggcctgacttaggttttaggaggattcctctgatgcccatgaggggagcagaccgtgagaagcaacggtgggagaggtgggggcccagtgaggtggcgactgcaatggtccaggcaggaggtgacggcggtctgacaggtggaagcggtgagcggggaggcagaggaaggccggacgctggggatgctccgaacactcacttttgatcaggcgctgtgctgagtgctttgtgagcttgatctcgtccgttcctcacaacctcccggtgaggcgggtggaatgagctccatttttacacaagaggaaactgaggcacagaggggcacagagaagtgaaggtaccagcccacggtcatcaccagcccaaggacacgaacacagctactgggctcagattcaaatccaattctgattcagtctcctcccatcattgcttaacaccctccactcctggggggaccaacacgatgaaggacagcctcgaagacctagatgcagtgccagcggcagcttgtggagttttggccattctttgttataggccaatttttcttttccttttctttctttctttttctttttttgtttttcctgagatacggccttgctctattgcccaggctggagtgcagtggtgcagtctcggttcactgcaacctccacctcccgggtgtaaggggttcccctgcctcagacttccgagtagctgggactacaggcgcccgccaccacacgtggctaattttttgtatttttcgtagagacggggtttcgccatgttggtcaggctggtctcaaactcctgatttcaagtgatccgcccacctcggcctcccaaagtgctgggattacaggcgtgagccaccgcaccttgcttattataaaccagtttttttgaccatgtgaaaagcattttgttaatgtagtctcaaggcaagcatctagcctcccctgcccgttgcccctacgtgcctccaggatggaaattctggacacttctcagtataagaagaccctttgcggccgggagcggtagctcacgcctgtaatcccagcactgtggaaggcggaggcggaggcgggcagatcacgaggtcaagagacggataccatcctggccaacatagtgaaactccgtctctactaaaagtacaaaaattcgccgggtgtggtggcgcgtgcctgtagtcccagctactcgggaggctgaggcaggagaatcgcttgaacccaggaggcagaacttgcagtgagccgagatcgcgccactgcactccactccagcctggcgaccctttgtgacttggccccacccacctttccagcttcacttcctcatcttcctccgtgagcctcaggctcagtgcatattttgttccttaaacgtgccctgctccttcccaccttagggcttttgtgcatgctctgtgcctggcagcttctcttcccctcagtcagtttctttttttttttcttttgagacagagtctcgctctgtcgcccaggctggagtgcagtggcgcgatctcggctcactgcacgctccgcctctccgattcacgccattctcctgcctcagcctcccgagtagctgggactacaggtgcccaccaccacgcccagctaatttttgtatttttagtagagacggggtttcaccattttggccaggatggtctgggtcacctggcctcgtgatctgccctcctcggcctcccaaagtgctgggattacaagcgtgagccaccgcgcccgggccccctcagtcaatatcttttgtcctttaggttctcactcaaatgtttcttcttcttggaagctttccttgaaccccaaagataggatgaatccccgtttcatgccttcagagtaactgatcacagaggtccactgtggatcacatccatagagctcacccatgtcctagggacttgaacagtgtccccaaaacttgaacagcacatactaggtttgcaataagcactgggaaaagaaagggaggagttaggccatcctgcttccaaattttaaggtcttaaaccatcccccaatggtttttcaacttttaagcaaaggaagcctattttctttttttctttttctttttctttttttttttttttttttgagacaatctcgctcttgtcacccaggctgcagtgcaatggcgcgatctcggctcactgcaacctccgcctcccgggttcaagcgattcttctgcctcagcctgcggagtagctgggattacaggtgcccacaaccatgcccggctaatttgtgtgtgtgtgtgtgtgtgtgtgtgtgtgtgtgtgtgtgtgtgtgtgtgtatttttagtagagatggggtttcaccatgttagccaggctaacatgtgctgagattacaggggtgagccacagagcccagccaggaagcctattttcaatgtctcacgtaaaacctcaacatacagaacagataaaagagaaactgctctaacactctctgatctctctctctctctctctctctttctctttctctgttgcccaggctggaatacagtggtgccatcacagctcactgctgcctcgacctcctgggctcaagtgatcctcctgcctcggcctcccaagtagctgggactacaggcacatgccaccactcctaggtaattttaaaattttttgtagagatggagttttgccatgttgctcaggctggtctcgaactcctgagctcaagggatccaactgcctgggcctccaaaagtgttgggattacaggcgtgagtcaccatgcctggcctctgcctggcctcttaagatgaaagttctgtgttcccttatgtgtgtaagatgggggtgtggtaagaggggctagatgtggctttgcaggcatggggaagggtccagaattaaggagtttcctgacaccaaggcaatcctcttaaacttgcttaatcagaccattaagcctattaggtaattaacccctctctggtgccttcctaccaatcatcctgacccctactgaattcattctcttccatggactcacggatatgtcctcttccccaccctcaccctaaacttgtcacagataaggggtcctttatctccagaaggctcagaaagatggggagggaattctcactaatccctaggactccgtcctctctctgcttcttcaatttcactccccatcttctctcccagccagagcatcttccctgcttccctctgagggtggaaggtattcattttctctgaagaaaactggggtcaccctcttccccatcttctgccccctctctcttgtacttctttaaactgtccctgagaatttttgtatgaaacagcagaagcaactctagactaagagtgacgtttatggtcgagcgcagtggctcacgcctgtaatcctagtgttttgggaggccaaggcgggtggatcacttaaggtcatgagttcgagaccagcctggccaacatggtgaaactcccgtctccactaaaactacaaaaattagtcaggcctagtggcacattcctgtactcccagctactcgggaggctggggcaggagagtcgtttgaacccaggaggcagaggttgcagtgagctgagatcgcgtcactgcactccagcctgggtgacagagtgagactgtgtctcaaaaaaaaaaaaaagtgcattttgccactgatgggctctatgcccttgggcaagtctcctcacctctttgggcctcagctttcctcatctatacaatgggaatcatgatagtgctacttcatggggttactgtgattaatgaaatgaggaaatgtaaggaaaggtacttcggatggtcccaggcacatagaagatttgagaaatgttagatatcatcattatcagcattgcctacaccatgaacacaagttcagtgcttatcacagcatcagacacagagcaagcaccctatacgtggggtttgggggttgggttgagaggtaggaggaggggtgatcctactttgttaatcacccatttccctagggggctgtcccaaacttttccctccttcttggaggaggaatgtcctctcactgatacaagccagaccttgtctccattctctgcactcagcctctctctaattcctgtctttctcatgccaccttctagaattttgccccttttatgtccttctgtactggaattgttctttcttctctttttctctccttcttccttcccttcctccaacaaatccttcctgagcacccatgaccttccagtccttggttcaggtgctggggatgcagcagggaacagacaaggtccctttcctttaaattccttttaaattttaaatgcatttatttacttatttatttattgtatttttagtagagacggggtttcaccatgttgcccaggctggtcttgaactcctgggctcaagggatctgctcaccttagccttccaaagttctgggattacaggcatgagccaccgcgcctggcctaaatgcatccatttaaagaagaaattaggccgggtgtggtggctcacacctgtaattctagcactttgggaggccgaagcagatggatcacctgaggtcagaagttcgagaccagcctgaccaacatggtaaaaccccgtctctactaaatacaaaaaattagccagacgtggaggcacatgcctgtaatcccagctacttgggaggctgaagcagaagaattgcttgaacccgggaggcggaggttgcagtgagctgagatggtgccactgcactccagcctgggcaacaagagcgaaactccgtctcaaataaaaaaaaattaagaagaaatttaaaaatcgttgctaacaattggagcttgaagggctggttgtttttgttctccctaacatacattaatataaacatacaatgttcaaaaatgaaaaaaaagtttgtccatggaccaccttaaatcatcttgtgggtggcttgatggtccctgtatcagactagtgcaaatctgacgcctggagccccctcttctagtgagtctcctatgaacagtgattggctaagacctcccacctgtagagactcagcacttgaattcccaggagtccccgttgtgagcatcagtctgtgctggtccttcccagaattttatgcacatcttttctgtttggggaagtttcccaccatgtgagtcctacctccccagaaagaaaccaggtctctattgaccagccttcctcacagcaagggcagacacgtgacctcagctgaactcggagccctcagccattacgcacgcccaccctgtttgaacaaccaaggcactgcttgtgagaaagttctcccttgtagtgaggcagaatctacatgccagaactccgcacccacccattcccatcccactcttcactcttcccttgagtccaggcagctccctctacccgatgtaagagtctgaagaactgaagatagcaagttcaggtctcctgactaatttcctgctgcaatttcaaacatttccaccttggaaaggtgccgtctttccccttctagtcactgagtctctgctcttgctccttttgtatccaccccctcagggatgcttctgacggctttcaaaaatcccagcactttgggaggccgaggtgggcaggtcacctgaggttaggagtttgagaccagcctggccgacaaggtgaaaccctgtctctactaaaaatacaaaagttagccgggcatggttgtggcacgcctttaatctcagctacttgggaggctgaggcaggagaatcacttgaacctgggaggcggaggttgcaatgagccgagattgcgccactgcactccagccggggtcacacagcagggctccatctcaaaaaagaaaaaaaaaaaatcagccaatactcccttcccccttccataaataacaattgcctacccaagagatttggggtgttgtagtaagagtggcctattttagtgtcagagagttcaccctctaaggtggctttgatcttgggggtcatgaatgacaaaggtaaagctgaaggggtgtgggttgttgaggtgttgtttttggtgttagtgtgtccagatgcaacatcaatgttgggtgttgtcctcatggcacctcatggttttgtttgggggctggggaagggagagctggcatgttctatgagggtacgaggaggctggggtttgacatcggtgttgtcatcgggagcctgtggggatgctgctggcagagagggtgtggggtgggagcagtactgccgaggaggggtgggacttcaggcatgtgatgtgtttctgtgaatggcggtgttgcctatttggtgtgaaatgcaatacaactagagtgtgcttatgtagggatgagatgctgaaaggtgtgatgctgccttgagttgtgacggtctctaagtgaaagaaaggcagatgggccacggttttcttggagtgaatcaccattggatggtggatggtgaaaagggaaaatgacatacacttatataataataatgatgatgatgatgatgatagcgactgtttactgagcacttaccatctaccagccttacgctatgtgcttcacatatgcaatctcatctaatgcacaaaacccagagaggtagatcttcctgcctccatgtttcagacaagcaggctgaggctcagagtagtgaaataactcgcctgaggattccacaccaagcacatgacggtggcaagatatgaatcctgaaagagctcattctaggaggggctcttaacctggtgatgttgacttcgtgataaagaatgtggccgggcgtgctggctcacgcctgtaatcccagcactttaggaggcctaggtgggtagatcacctgaggtcaggggttcgagatcagcctggtcaacatgatgaaaccccatctctactaaaaatacagaagttagccaggcgtggtggcacatgcctgtaatcccagctacttgggaggctgaggtacgagaattgcttgaactcaggaggtggaggttgcagtgagctgagatggcaccactgcactccagcccgggcgatacagcgagactctgtctcagaaaaacagaacaaaacaaaacaaaataaacaacaacaacaaaaaacaaagaatgagggatgtggctgggaatggtggctcacacctgtaatcccagcaccttgagaggatgaagtgggtggatcacctgagatcaagaatttgagaccagcctgggcaacatagcaagaccctgtctctacaaaaaaattcaaagaattagtcaggcttggtggtgcacacctgtagttccagctactggggaaactgagatgggagcatcacctgatcctgagaggtcaaggttgcagtgagccatgactgcaccactacactccaagcctgggtgacagagtgagaccctgtctcagaaaaaaaaaaaaaaaaaaaaaaaaaaaagagggatgttaggagcaagatctggctggtgtaagctacgttgagggtgtgagatatgtatgtatgtctgtatatgggtttttattttgggggggttgacagaggtgggaatatagtcaggagtacaggggtcattattgttgcagcttaagagttacgatctgtatcaagggggccactgtttgttattgtcctgccagactggggtcatttatttctgcaaggagtccctgactagagtttccgtccaacctcttcacccaagtcttcctgcccttagtgccttgttttcctcccagcggcatctgccagccactcacagtgcccagaagcaagtgtgaactgccaccatctcctccacttctcccatctgctcccagaagcgggcaggagtggggcaagaatctcatctgtccagtaggccactgcttgctgggacacccaggaaaagccctctgagcctcagtttccccatctaaaaatagggtccattctagtgtctccccacacaatggagccagccgcctaagttcacatcatggttctgctgcttatcagctgagtgacgttgggcaagtgacttaacctctctgtgcctcagtttttcatctgtaacatgggttaacatgatagaattgttgtaaggattaaggaattgatccatgtcaagcacttcccatgatagttcctggcatactgcagtatcgtaagtctagccattattataactgattattattattccatcatagcatgttgggagagtgatatgaaattgcacgtaagacattaaacaataatataggtagctattgttagtattatccttgtgttttttgttggtttttttttttttgagatggcgtttcgctctgttgcccaggctggagtgtggtggtgcgatctcggctcactaaaacctccacctcctggattcaagcgattctcctgcctcaacctcctgagtagctcggactataggcgcccaccaccatgccccgataatttgtgtatttttagtagagatggggtctcaccatgttggccaagctgttcttgaactcctgacctcaaatgatccacccgcctcagcctatcaaagtgctgggattacaggcatgagctactgtgcccagccccttatggtcatttttatgtgcccacttggcagatgaggacactgaggctcagaaaaggggatgggttggcccagcatcccccagctatgaatgtatattattgaaagaagccctcaattttgggatcaaagtcctggacccttgcccagccctgcccctgagtgtgtttctgtcaatggaggcctgtccctctgcatctcccggcctcagtttccccatgagtaaacagaagcggggtgggagacagtctggaggagatggtccctaaaggctcatcctagtttccccgctgtggagggaggcaggatagcacagaggttacgtccaggagctccggaaccaggcagcctagggttgggtaaattctagctccatcacttagaaaccgtgtgaccttgggcaagcggtttcattttgctgagcctcagttttcctcatctgtaaagatgctcaaatcatgtctcccaggggttgtactgagatattaacccatgtctcagagtagtaggtgccaagtaggcagatgtgactgttattagcagcagtggcatcagtgttaagttgtgctgagaagtgatcagattctaagcatctcagtccctgtagagaaaggtgggaaccccctaccctctggaggacggtggtggagggctagacagtctggctgggctcagggacctcctgggtccctgacctctccaggactgggaacagcagtggggcaggaaggagggaaggaagtcggggacatattcatgtgtgtgctgggggtgggggagcaggaagaaggacaggaaactccctcccatcccctcccccaacttccctttcctccaatttctgctggacaccctcacaggcatccagggggtccctgattcctgtcccacctggatggaggtgggggagggctaggatgggaggaagaaagtcggcttgtattcatctgtagggaggaggtaggaggcccccaccccacccactgccaggcctggcggagaggaaagggtgcactctgcctgaagccatccctctcccatccggaggaaaaggccagaggaagtggagattttggcaaggtgaccgcggggaggggcttgtccgctgcggggtctccctcctaccagggagctagaggacagggctctgaggaccccaaaaaaccccacctcttccctgagccccccacggcagggcatgcacctagagttcccagctcggcttttcttctctggtacacacacctccttgggtcacacacccagggagagcccctctcttccctcacactgccttccgtggtgtcaaacattcggcaatctccaatacacacggacacacacacagcctcccttgtcaaacacatgcagaatcatccccatatctctggtgtcacacactcagccatttcacacacacacctctccttgttacacccatacacacagctgggtgtcatatgcacacgtgccctgtcacatggggacccatccttccttctcctttttacacaccctcgtgcgtttcacccacaagccccagcctctccctcgtcatacacccaccttccctgttgcacacaccccctctgatgtcactgttgcacacctccatgtgtcacacccagccacagcctctctggagtcacacccacacccttttcttgtcacatcccctcaccagccacgcctgtgtcacacacactggacccctttcctctgatctacacggcctcttctggctgacacccagagccagcccattcggtgtcccccacacacctccttgcatgtcacacacaccctctcatgtgtcacactctgccacagcccccttgggggtgacaagcacacacctttccttgtcacacgtacccgctggagggtctcaaacatggagcccagcccctgtcccctgtctttctcatacacccccctatgctgtcatattcctgatccctaatgtcacacatccaggctgtagagggcacacatacacacacacgcacacacatacacacctgtcctagcctcacattctcccacctagctttacacacccaccatttcctccatttcaccccacacacctacccagcctgtccccacgcacgatccggccagggccacacaagcctccatctgggacaacccttgttcaggacatccccagggagggaggctgggaagctcccggtccacaggcctctactccttcccctcccccagccaggacacgcgagctcggggaacacccctgctccgaaagggtcacatcacacacccctcaaggacacacagacacctgccctgaggctcccacgccccccatcttctgcgccccccaaggacacttatcaccccctcccccccacccctctcctcgcagacaaagctcccagccccgggcctcagcgagaggaggagggggtccagccccctcctcaactccccgctctgtcccccgcctcggggaggggtgtctctcccctccccagagcccttgcacctgccacgggagggggggaaaggatggagaaaggcgaggccccctgcccgctcccccgccccgagccgcagccctttctcacctcccgtgttgctgcgcttggtgcagaccacctcggggggcgtttcgaggggcctcttgcgggaatccggggcctcgggctccatggggggggcctggggcggcggctgctgctgctgcggcggctgcggcggcggcggcggcggctgctgtggcggcggcgacggctgctggggaggctggggttgcggcggcggcggcggcgggggcggcggcggctgcggggccgcggaggccgtgaagaggccgtgcaccgcgccggcggccatcatcctcatggtgggggggggcggggggcggggggcgggggagggggaggggaggggaggtgggagggggagggggcggtggagggatgggggagggggagccccggagagggaaggcgggggtaggggggagccggttctcggggggctgacagagcctggagagcggccgtgagcaggatggcagggccgaggggggtctccgatagggccgggaaagaactgagaggtggggtctctcctgggaccacagaggctggggactggacgcgccactggggggacgggactccccgcttcttcttggctccctggggcaagagggccgagccccccagaccctgctcggggtggggggccggaggagcgtggccggagtgggaggcggaggcggccgctagtgggggcccggggggcggcgggcgcgggcggcggcggcgacggggctggcggtggctgctggcccgagcatcttcttcccggaggctcccacagcgcctggcccctcccacccaacgaggtcacgcccatgccgggtagggccacgcccttcggcgcccccattggtccagccttgaagcctggaccacgtccctctgggttggccacgcccctcccggcggcagagagctggacccgactcccccaggctgctgggaggaccccgggctcctccaagccgtccccactcctcaccttgaatgaacgtttattgagcacttactgtgtgccaggtccggttccaagcaagcacgtcacagacgttatcgcatttactccccagagcgaccagctctgtgagttacgcttattatccctattttacagatgaggaaacagccttaggagcttactttgacttcacttggtcaagacaagaaatttcgactaggcgcggtggttcatgcctgtcatcccagcactttgggaggccgaggcggaagaatcacttgagcccaggagtttgagacgagctgggcaacaatattgtgagaccccatctctacaaaaaaaaaattttttttttaattagccaggcgtggtagcacatgcttgtagccccaggtactctggagtctgaggtgggaggatctcttgagcacaggagtttgaggctgcagtcagccatgatcaagcaactagattcgagcctgggagacagagcaaaaccttgtctcaaaaaaaaaaaaaaaaaagaaagaaagaaagagaaagaaatttcacttcactctttttcaatcctttcagctgggaaattccccttcaaatctttcatccatcctttgaagaatcaacaccgtgatgctgaaagggctcagaggattgaattcactgagctggagttgcagcctgcagcacctgccctggggcacaactggctctccattcaaacaacagcactcagggcctacctactaagtgccaggcactgtccctgatgctgcgatacaatagagaacaaaacagccttggcccttgtacagtattactactcatgtcattaagaaaaatttgttttcagatgacaaagtggaggcctgggaacattgagggtggcttcttcaagggcacacagcttgagagagagaaactgggatgagaacgcaggacaagtccaatttcagagcccaaagtcattggaactagggtgcctttctttggaatggatcattgctattattctgtgttccttgatgcaagaatttccttctccctgggttcttaacctccaaggaatctttccttcctgggttggtcagaggcaagattaggctcagaaggggtctggatgcaggtaattgtggccactgcgtgatctgcggcagggggatcggctccaacccccccctgctcctcccttgccatgctctcaggtccccaggatgggggagggtagcagatggcctggggtggatggggtggctacccatctgtcccctcccccccattgtccccagagccaagggggatgggagggggctgtggtccactgcagtctggatcctccccctccatcttcctggagggagctgaggagctggttgccatggagatggggaagaggcaagacggatatagggagatacgggggtcaggctgagtaccacaccttagaccctttgagtcaaatagcctcacaccacacaggtacatatcccaacatccatgaaattagctgtgaagtttccccctctgtgtgacacacacagagtcacactggccctgctgcaggtgcacggtctcaacacagtcacacagacacacttataggggataggcacacgtacacacacatacacactcatctgtaatgcacattcagtcatgcagacgcaaggccacaacacaggctctcatacacaaatagacagacacacatctaatatgcaggtatgtcccaggtacacacattcagagccacgacagctccacacttggccccacacactcggaaaagttacaaatccatgatcaaagccacaggacatccatggcctatgttacataagacatatcagcgacatgtgatgtatagactgacgaacagactaagtctttccttgcacacaaattgggtaaacacacacaacacacacatttagatacacggcccacataggctaacgcacacaataactggacttcacgggccactcagtgacacgcacaacacacatggaaagctgtgtgccgctcagcccccacccccgaggcatgcctgcagccccaaccctgcgctccccccatcgagccctcccgtttggacacacacaacagcacggtcggtcacgcactcacactcacacacaaacacaaacctcctgctagatatttttaaacccgggctagttctgctgccatggcaaccgccccaaacccatcaccatagcaacccaacgtcagctttccaagcaccaaatcctgggggactgcagggccccaatcagaggctggcggagggggctgctgcaccctttgccatcatccatgccacccttgtgcccccaccccagagctttcaggggagcagtcaccctagtctgggcaggggccagagtcagggacatcagagacccccaccaagctggggcaggggatccccgaacctgccttttccttccaacctggcagagctatatggaggggctcgttggagtgaaggtcagcttacagaagcctgggtttgagttctggccctgccatttacatgctgtgtgacttgggcatgcccttaccctttctgagtctctcattctttaatttggaaaatgttgctgctgctgttaataccccctttatttttattttattttttattttttaattttttggtatttttagtagagacaaggtttcaccacgttgaccaggtgggtcttgaactcttgacctcaggtgatctgcccgcctcgacctcccaaagtgttaggattacaggcgtgagccaccgtgtctggccaatatcccctttaaatgactgttatgatttggtggttaaaagcccagacagatctacatccagattctggctttcccacttcttagccatgtgaactcaggcaagggccttctcctctctatgacaagtctcaggggtaaatagtccaattacatagggctgctgggaagattccctagcaaaggggtatggcaactgtcctaagaactttgcatgtattctaacttatcagtcttaaacatggtcttatgggtggattactattcttatacccatcttgcggaaaaggaaactgagatccagagagcttgcctggtgtcacatagctacaaagtttagaaggatgggatttgggccgggtgcagtgcctcacgtctgtaatcccagcactttgggagggcgagatgggaagatcacttgagtccaggagttcaggaccagcctggacaacatggtgaaaccccatctctactaaaaaatacaaaaattagccacgggtggttgtgcacacctgtatttccagctacttgggaggttgatgcacaggaatcgcatgaacccaggaggcagaggttgcagtgagctgagatcgtgccactgcactccagcctaggtgacagagagagactctgtctcaaaaaaaaaaaaaaaaaaaagaagaagaaggagaagaatgaatgggatgggatttgagcctgggcagtcaaagacacatctttagccatttctctctcctgcctctcaaagagggcagtttggagaagggtgacagaatggtgcatccttggaaaggctttctagctttgttttctgggatgaaatgaaaggcctcagtctttcagcctacagaatggaggttgaaatgatactgctggctggagtgtcaggaggatcgataaggcagtttgtacctgttgggctctgaggacaggctggcacccctgagtgctcttgcaggtgtggagcagatcaggagaggctgggcgagtgggcaaatgggcaaggattacctgtgcaggctcaggagagaaactcactggggctcaagcctcagctttcccagcctggtgatcttaggcatgagatgtctccagcctaagcctcagtcttaccatctgtcaaatgggaatcatgaccatactcggggtgtgacaaggagtccatgagccaaagcaggcaaaaccacttggcacggatctcaacaaagagataaatctgagctgctattaatatcatccatctactcagcgcacaggatttaggagaggcaggactgcaaactttttttgcagggtttttgcaaactttgttgactcacagtgagaaacacacatcatgatgcaatgcatatattaggttggtgcaaaattcattgcgatttttatcatcaaaagcaatggcaaaaaccgcagttacatttgcaccaacctaatacaactgaaatgaaagtttcatgaaaccacgcttcatctccaccttagtctacattatgttgacactatgtgcgtagactctgatctattcttttttttctttttttttttgagacggagtcttgctcagttacccaggctggagtgcaatggtgcgatctcggctcactgcaacctccacctcctgggttcaagtgatcctcccacatcagcctcccgagtagctgggattacaaggagccgccatcatgcccggctaatttttgtagagatggggtttcaccatgttggtcaggccggtctggaactcctgacctgaggtgagccatctgccttagcttcccaaagtgctgggattacaggtgtgagccactatgcccggctgactctgatttattctatgctattgaaaaaactactggttgattttacagcctgctaagcagttgtgaccgacagtacagaacaccctggtgtggcgattacaatgtggaatccttgagtccctggaggattttaagcaaggaagtgacatgggcatcatagggacgatgaaggggagggggctagatgggggctgggatgaagccagaatggactctaagaaggagggatcctttgcctttaccccctggcagaagcagcggagatggagatcgtttgagcttgggaattcaaggctgcagtgagctgtgagatggagaggtgtggtcatataccaacaccagaaagcagctatctcagcgctttgcataaaaaggtatagtggggaggagcatgaaccccagacactcatctgcttggcaaatatttactgagcacctactatgtgttgggcactgttctaggtgctgggaatacagcagtgaacaaaacagatacaaattcctgacctcatgagctcacgttccagggagacagataatcaagtaaaaaagtaatacatagagtgtgacagatgaggctaactaccgtggggaaaatgcagcaggggaggaggaagaggcatagggtatgggggcaggggggatggctgcaattttatttatttatttatttatttatttatttatttatttactgatggagtctcactctgtcgcccaggctggagtgcggtggtgggatctcagctctctgcaacctctgcctcccaggttcaagcgattctcctgcctcagcctcccaagtagctgggattacaggcccgcgccatcatgcccggttaatttttgtattttcagtagagatagggtttcaccatgttggccaggctggtcatgaactcctgaccttaagtgatccacccacctcggcctcccaaagtgctgaaattataggcatgagccaccacacctggcctgcaattttaaatagggttgacatagagagagaaggcctcgctgaggaatgacatttgagcagagacctgaaggaggtgagggagtgggccgcatgggtctgtagggggagcagcaggtgcaaaggccctgaagcaagagcatgtctagtatgttggaggaagagcaaggagcctagggaagctggacgacagtaggggaggggaatagtgggaggaataaggctaaagagccagtcagggagccaactgtgcagggggccttgaggaccaccataaagacttcaatttgtatgcctgtaatcccaacactttgggaggccaaggcaggaggatcgtttgaggccaggagttcgagattagcctggacaacatagtgagactctgtctctacaagaaattaaaataaattaccagatgtggtggcatatacccgtagttccagctactctggaagctgaggatcgcttgagcccaggaggtcaaggctgcagtgagccaagatcacgccattgcgacagccttggtgacacagcgagaccctgactctaaatcaattttttgttaaaagacttagatttgactctgatttaagtgggagccatgggggtgggggggtggttgtgaacagaggaagaacttgagcagacttaaattttatcacatgatccttctgggttggatacagtggctcatgcctgtaatcccaacactttgggaggccagggtgggcgggttgcctgaagccaggaggttgaggctgcagtgagctgagatcgcaccactgcactccagtctgggtgacagagtgagaccctgtctcaaaaaaaaaaaaaaagttggggaggccaggcacgctgggtcatgcctgtaatcccagcagtttgggaggccgaagcaggcagatcatctgaggtcaggagtttgagaccagactggccaacatggcaaaacctcatctctactaaaaatgtaaatattagcaaggtgtggtggtgggcgcctgtaatcccagctactcgggaagctgaggcaggagaatcacttgaacccggaaggtggaggttgcagtgagccaagattgcgccactgcactccagtctgggcgacagagtaagactctgtctcaaaaaaaaaaaaaaaaaaaaaaaaaaaatactggggggaatccttctggctgtgtatgaagaacatggtagcagggatggggcagaagtaaggagcccaataggaggtgactttgaccaaccaggtgagaggtgctggtggttggaccaggatgtgagacagcagtgctggtgaggagatgtcttggaatcccagttctcccctgtgactttgggcaagtcatttcagagtctgtttcccgatttacagatgaggatgataataaagctcccacctcagagggctcctgcgtagtcttcatttcactgagcgtgaatagcccctggcacaagtgccgcctgccattgtcactaattttatcctcaaggctcctggatcagggcacttctgtaccctgcccagtggtgcacaggtgggctttggggaggaggataaggagaagagatttaatcttgtgtgctgattgtgtgtttatctgatcctggggatatctgagtcagggctttctcttcctaacagcctgtctgtagtagggagtattgaagtccagtgaggggtgctagcttgcccagaagcccacagtgagttgggggctgagccagggctagaaatctatccctgcctcctgttttctcaggcctgtgttccaggtcctggctgccaccttggtgattttggcaactgactgagtcccctcccccgctccagcctcaacatcttcctatgagtccctgctgcctctgggagaaattccaaactctcccggttgctcaggccaaaaccttgcagttgcccttgacatccctttcttcctcacacccacatccactccatcagcaaaccctttctgctctaccttgagttccaaatctcaccccatctccctacctccagcggcaccaccgaatgggggtccattagctcccacctggactctcccaggagcctcctccctcagaccccacttccacactggcccaccctttcccaccagcaaccagagtcatcctttttttttgagaccgagtctcgctctctcgccaaggccagagtgctgtggctcaatctcagctcactgcagcctccacctcctggattcaagctattctcctgcctcagcctcccgagaagctgggattacgggcacgtgccaccacacctggctaatttttgtatgtttagtagagacggggtttcaccatgttggccaggctggtctcaaactcctgacctcaaatgatctacccgccttggcctcccaaagtgctgggattacaggcgtgagccaccgtgcccggcccagagtcatccttttcaaaggtgagtcagatcacgcactgcgctttatctaaaagaaataaaaatggggtttctggccaggcacagtggctcatgcctgtaatcccagcactttgggaggccaaggcaggaggatcgtgtgaggtcaggagttcaagaccagcctgggcaacacagtgaaagcccatctctaaaaaaaaaaattcagccacacacagtatcttccacctgtagtcccagctacttggcaggctgagatgggaggatcatttgaacccaggaattcaaggctgcagtgagccttgatgacaccactcgcactgcagcctgggtgacagaacaagagcctgtctcaaaaaaaagtgtgcgtgtgggtgatttctgtaagaaccttgaggaacaatctgtattgctctatttcttggcttaggttgtggaagacgaaggcactttctgtgtgtctcttatgactacaaatagtacgaatgggtcggctgtggtggctcacacctgtaatcccagcactttgggaggccaaggcgggtggatcacaaggtcaggagttcgaggccagcctggccaacatggtgaaaccccgtttctactaaaaaatacaaaaattaactgggcatggtggcacgcgcctgtagtcccagctactcgggaggctgaggcaagagaatcacttgaacccaggaggtggatgttgcagtgagtcgagatcgtgccactgcactccagcctaggcgacagagcgagactccatcttaaaaaagaaaacaaaacaaaacaaacaaacaaacaaaaaaccccagtggaactgtgagagagctgggctttgaaccctggcagcctggctacaggggccattcttttaactgcttcaccagctgcctctctttctcacatgtccccctccctcagctgcaacgcctccccaccccatggtcctctccctccctggggatctcgatgcttccctgatttagaactgcaagtgcgtagacttatgctgattctatgcaatcatcttcagttacatttaattttagtaatttctccccttcatctgtccccccacaggcacccactcttatgtgcttaatttttggccttccaatctttctattcttttatcaagatccctgtgtatccttgcagttagttttgctgtatgtgggtgtgtgtggtgtttttttttttttttttttttgagatggagtctcgctctgtcgcccaggctggagtgcagtggcgcgatcttggctcactgcaagctccacctcctgggttcatgccatcctcccgcctcaggctccctagtagctgggacgacaggcgcccgccaccacgcccagctaattttttgtatttttagtagagatggggtttcaccatttacaggatggtctcgatcttctgacctcatgatccaccctcctcggccccccaaagtgctgggattacaggcgtgagccaccgtgcccggcgctgtatgtgtgttttaaatttgtagagtcgttgttaagctacaaacctcattctctttctttctttcttctttttgagagctctctgggtggctatgcttatttctagctggagatgagtgccagagtctgccccggttcaagttccatcctcactgcttattggatgaatgaccttgggcaagttacttaacctctctgggcttcagtttctccatttgtaagatgaaagttgttaaataatggtcactttctcataggattgttgcaagctggttttttgtttgttttttagagatggaatattgctctgtcacccaggttggaatgcagtggtgccatcatagctcactgcagcttcaaactctggtacttatttggtcttgaaacccactgggaaacagtagaacagtgagttttgcaaaggcaggaacaaggaattgagtagagggtaactccttatgctggaaggtcctgggctccagcgatcctcctggcttgacttgctaaagtgcaagctgatatcctttttttttttttttctgagatggagtcttgctctgtcgcccaggctggagtgcagtggcacgatctcggctgactgcaacctctgcttcctgggttcaagcaattatcctgcctcagccttccaaggagctgggattacaggcatgcgccaccacgccccgctaatttttgtatttttagtagagacggggtttcaccatgttggccaggctggtcttgaactcctgacctcgtgatccaaccacctcggtctcccaaagtgctgggattacaggcatcagtcaccgctcccagcccaagctgatatcttaaagcattcagcattgggcatttactgagcaatacactgatgttagtttctccctcttttacattgctgtgtagtattccactgtgtattccatattctacttctccaaccctaatgatggacatctacttctttccaactccttgctgcctaaattgcactccaatggacatcctcatacaaatctcatttaagggcctgttggacagtgtgataattgggtcatcaggcatcctcacatttaatttcttaaagtattgctggattgttcgccagaagggatgcacctctttggcctcctaccatccatggcaaatgatccattcttgcatatattcctccagaacttgatgttcttagactgtctaatttttgccaatctgttggatgtcagagaatgaatgtattgctttgatactttttttcctttttttttttttttttttgagacggagtctcactctattgccctggctggagtgcagtggtgggatctcggctcactgcaaactctgcctcccggtttcacgccattctcctgcctcagcctcccgagtagctgggactacaggcgcccgccaccgtgcccggctaattttttgtagttttagtagagacggggtttcaccgtgttagccaggatgatctcgatctcctgacctcatgatccgcccgccttggcctcccaaaatgctgggattacaggcgtgagccaccgcgcccagccctttcttttttttaagacggagtctcgctctgtcaccctggctggagtgcagtggtgtgctctcagctcactgcaatctctgcttcctgggttcatgtgattctcctacctcagcctcccaggtagctggggtagccacgcctagctaatgtttttgtatttttagtagagatggggcttcaccaggttggccaggctgatctcgatctcctgacctcaagtgatccatgcgcctcggcctcctgaagtgctgggattacaggcctgagccacagcgcccggccttgatactttcttatgtagatcagcttagcttcttcaggtttcctcggtcttcatctctacccagagttaccacaaactaatgtgtgtgtgtatataaggctttcaatatgaacccttcaatattatatatgtacattatatatatatccacatacacacacacacatatgtatatatacacacacatatatatatatataatagtttggagacagggtctcgctctgttgccgaggctggagtgcagtggtgcaatctcagctcacggcagcctcaacctccttggctcaagtaatcctctcaactcagcctcctgagtagctgggaccacaggcatgggccaccacacttgtctaatttttgtattttttgtagagtcggggtttcgtcatgttgcccaggctggtctcaaactcctgagctcatgcaatgcacctaccttggcctcccaaagtgttgggattacaggcctgagccaccatgcctgggccaaacactttaatattttaattgctgtcacagtagaaaaggaatcataatagcacatcccttctaaactgttatgacgattcagtgaatgataatagccacggtttattatgtgtttactacacggcgtgtgctgtgctaaactctgtatacatttactcacttatttcctctaaaagctctgggaggtccctgctgctgctatcgcccccattttatagaggagaaaactgacacatgaagaagttgactgcaagaagcagagctggaattgaaatccaggcagacaggctaactgaccatctcactgcctctcaatgagcctatgcaggaaaaacacacagggcttcacaaatattctgtatcatcccacctgtgatactcaggcagggcagtccagaagggcttggggaacgtttgctgattgcctctgcaaatttcttttttcgagacgagggcttgctctgttgcccaggctggagtgcagtgtggcacgcataatcatagctcactgcagcctcaacctccccggttcaaaacatcctcttgcagcagcctcctgagtagctgggactacaggcacacaccaccacacccagctaattttttttatttttagtagagatagggtctcactatgttgcccaggctggtcttgaactcctgggctcaagtgatctgactgcctcagcctctcaaagtgctggaattacaggcatgaaccactgcacctcctccacaaatttcataatgggttgagctattgggacattttccgagcataataataattgcatgttgcatttgggagaaaaacatcattttagagcgtataaaacctgaaagggacctcagtgggttgttaccgcatctgtaaaaggttcgggtaagactcatggtccctctcctttccagagcccctctgtttaccacatcaaagcatttataaccataatcatcacagccagattctttatttatttatttattttgagacagcgttttgctctgtcgcccaggctatagtacagtggtgcaatcttggctcgctgcaacctctgcctccagggttccagcgatgctcctgcttcagcctcccaagtagctgggactacaggtgtgcaccaccatgtccatctaatttttgtattttcagtagagacagggttttgcaatattggccaggctggactcaaactcctgacctcaagtggtcctcccaaagtgttgggattaaaggcatgagccaccatgcccggccaacaggcaggtttttatgagaatccccaagagcagcacttctgcagggtacacggctgtcacccagctctttcctactctgcacctgcatctgctgaacgtggccggagaaaaacacataatacagtggtgagactgagctcaccacaatttcacgattactcacctgggggctggggactgcctgccaacctcagtcctgtctattcactctcccaccctcctgggaatctatttcctacctgtggttccctcctccaaccttgcccacctcctctccatcctcaccctcacccttgaccctgttcttagttcctggagagaagagaagccatcaggaaacttcctcagattttcttgttttttttttggttttgttttgttttttgttttttgtttttaatggagtcttgctttatctcccaggctggagtgcagtggtgcaatctcggcttactgcaacctccgcctcccggcttcaagtgattctcctgccttggcctgctaagtagctgggactacaagtgcatgccaccacacccagctaattcttgtattttttttttttttttttttttttagtagagacggggttttaccatgttgatcaggatggtcttgatctcctgacctttgatccaccaacctcggcctcccaaagtgctgggattacaggcatgagcaccgcacccggcccttacgcaggttttcaacacatctacccacctacctgtgactattgttttcctctctcctgttaactgcagaaacactctcagccaaggccaacttctacatgtgtacacttggtccccttctctctcgcctactcagggacatcagtcaagcaagcctctgctttctctcctgcaccatcaattctccggtatctcctcgagcattctcattggcatcaaagcacattctaatacaaacctgctttttctttttctttctttctttctttctttctttctttctttctttctttcttactttctttctttctttctttctttctttctttctttctttctttctttctttctttctctctttctctctctctttctttctttctttttttctttgagatggaatcttgtactgttgcctgggctggaatgcagtggtgcgatctcagcttactgaaacctccacctcctgggttcatgcgattctcctgcctcagcctcccgagtagctaggattacagacacacaccaccatgcctggctaattttattattattattattattagtagtagtagtagtatttctatttgtatttttagtagagacggggtttcactatgttggccaggctggtctcgaactcctgactttgtgatctgcctgcctcagcctcccaaagtgctaggattacaggcgtgagccaccacgctgggcctctgctttttaaactccgtgtctgactctagcttcaatgttctgctgctctttataatacaatcctcagagactgggcatggtggctcatgcctgtaatttcagcactttgggaagccaagacgggtacatcacttgaggccaggagttcaagaccagcctggccaacatgggcaaaaccccatctctactaaaaatacaaagattagctgggcgtggtggccggcacctgtaatcccaactactcgggaggctgaggcaggaggattgcttgaacccgggtggtggaggttgcagtgaaccgagatcgtgccactgcactccagcctgggcaaccaagtgagactctgtctcaaaaaataacataataaaataaaataaaacaacacaatcctcagaggtatttgtactcatcttgtgtctctgattccttttcctcccaaatctgtgactttgccaaatcagctgttttttttttttttttttctcaggctggtcctgaactcctggggccaactgatcctcctgcctcagcctcgtgagtagccgagactacaggcatgtgctaccatgtctggctatttttaaaatgttttgtagagacagagtctccctatgtttcccaggctggtctcgaactcctaggctcaagtgatcctccctcctcagcctcccaaatagctggaatggcaggtgcaagccactgtgcccagctccaaatcagctcttggtgatgttaccaatgacccctatgtggctcagtcccgttgtccagtggcctgtcctcatattacttgagctccctccttgttgacagtcatgccttcctccttggtttattttctccctcaggttccaggacactccactctcaagacttcccttctggcccattggctcctctgcagtcttgcccgtccttggagtctttaaacattggagggctgtagggctcagttctggattctcttctcctttctctcttcactcactcttttggtgatggactcccacatcaatcagtctaggttggatcttatccctgaactcagactcatattcacctgtcctctcaatatttccactgggaagtctactgggtacctcaacacttccaaaaccaaatttctgattcacattctcctcctgtctccctatacctgcaattcacctaatctcaatacgtggaaacctcatcttggcatcttttcagatcaaaaaccttagagttggccgggcgcggtggctcacgcctataattccagcactttgggaggctgaggcgggtggaacacctatggtcaggagttcaagaccagcctggccaacatggtgaaaccctatttctactaaaaatgcaaaaaattagccaggcgtggtggcgggtacctgtaatcccagctactcgggaggcagaggcaggagaatcgcttgaacccgggaggcggaggttgcagtgagccgaggtcgcgccactgcactccaggacccttagaatcatttttgactcctctctttctcttcctcccgacactcaatccatcagcagattctgtcagctctaccttcagaatagattctaaccacttctcaccacctccgccatcaccaccctcgtggaagccaccatcacctctcattctaatgattttttaatctgttgcttaaattctttttttattgaggtgaaattcacattaacagaaaattaaccattttaaagtgagcaattcagtggcatttagtacgttcataatgttgtgcaatcatcacctccatctagttccaaaacatttcatcaccccccaaaggagacctcacacccattaaacagtgattacccattcgctccttcccccagcctctggcaccacaacactattttctgtctctgtggacttgcctcttctggacacttcatataaatggaatcatacactatgtgaccttttgtgtttgtcttctttcacttagcatcatgttttcaaggtttattatccatgttgtagcatctatcagcacttcatttcttttctctttttcttttgtttttgagatggagtcttgctctgttgcccaggctcgagtgcagtagcgcgatattggcttgccgcaacctccgcctcccgggttcaagcaattctcctgcctcagcctcctgagtagctgggattacaggcatgcgcctccatgcctggctaattttgtatttttagtagagactaatatggttttgccatgttggccacgctggtctcgaacgtctgacctcaggtgatccgcctgccccggcctcccaaagtgctgagattacaggcatgccactgcacctggccttatctgctcatagatttatggacatttgggttgtttccaccttttagctattgtgaataatgctgttatgaacatccatgtacaagtatttgaataccagtttttaattcccaggtatacacctaggagtgtaattgctgggtcatgtgttaattctgtttaactttctgagaaactggctgttttccatgtccacattattttaacagcctaagttttttaatttaaatttttatttttagagatcggttctcacaggctggagtgcagtgtcgaactcctgtcctcaaacaatccacctgcctcaacctcccgagtagctaacagcctattcttaatgcagccaccataatgatcattgaagacatgaatgagtaggccaggcggtggggctcacccctgtaatcctagtactttgggaggctgaggcgggtggattgcttgaactcaggcgttccagaccagcctgggtaacatggcgaaacctcgtctctactaacaatacaaaagttagccaggtgtggtggtgcatgcctgtaatcctgctactcgcggggttgaggcaggaggattgcttgaaacagggaggctgaggtttcagtaagccgagatggagccactgcactccagcctgggtgacaaagtgagaccctgattcaaaaaaaaaacaaaaaaagacatgagtaaaattatgtcctctctgcctaataccttcgatggctcccacctcactcagagtaaaacaaaaggcctcacaagggccgacaaggccttatataacctggtctcaggcatcctcccagacatcatcttctgtcacactccacacactcaatattgatgtctttgctgtttcttagaaacaccaggcatgttcccactacagggcctttgtactcactgtctcatcttcttgcaatggtccaccttggtaccctcaaggctggcttggccaggagcggtggctcacgcctgtaatcccatcactttgggagcccgaggcgggtggatcacatgagctcaggagttcgagagcagcctggccaacatggtgaaaccccatctctactgaaaatacaaaaattagccaggcatggtggcatgtgcctgtaatcccagctacttgggaggctgaggcaggagaattgcttgaacccaggaggtggaggttgcagtaagctgagatcacgccattgcacctccagtctgggccacagagcgagactccatctcaaaaataaataaataaataaataaaaataaaaataaaaaaaataaataggctgggtgtggtggctcacacctgtaattccagcactttgggaggctgagataggtggatcacttgaggtcaggagttcaagaccagcctggccaacacggtgaaaccccatctctactaaaaatacaaaaaaattagccaggcctggtggcaggcacctgtaatcccagctactcaggaggctgaggcaggagaattgcttgactttgggaggtggagggtgcagtgagtcaggcgccactgcactccagcctgggcgacagagtgaggctctctctccaaaataaataaatgaataaataaattcctggctcagtcacttgcttcaggtctctgctctaaatcagcttttctgagacatcttcccacccctctaacccccagttccatccacttcactctgctttattttctctgtagcacttatcaccccggacctggacatttctttctttcttttttttttttttcttttttttgagatggagtctcgctctgtggcccagtctggagtgtagtggcctgatctcagctcactgcaacctctgccttccgggttcaagcgattctcctgcctcagcctcccaagcagctgggattacgggcatgcaccgccatgcccaactaagttttgtagttttagtagagacagaattttgccatgttggccaggctggtcttgaactcctgacctcaggtgatccgcctgccttggcctcccaaagtgctgggattacaggcgtgagccaccgcgcctggcctatttctttactatatgttattatttgccttcctttcactagggtatgagcttttcctgtttgttaccagatgtttctacctccagcacccagaaaagtgcctggaacatagcaggtgctcaataaatggcctgacaagtgagtgaagaaataagtgaagcaatgaattgaactccacttacagatgaagaaagtgaagttcccagaagaggcatgacttgtgggaggtctcacagctggcaagggaaagccttcagattctaatccatgtttcctttttttttaattgttatttatttattaattattttcttagagacagagtcttgctctgtcactcaagctggagtgcaggcatttatgggatttagctgaggggaaggtgaagtgagaatacatttagattgggtttacagggatatttttatgtggttcatagatacttctcggatacttaaaccacctaattagttgtcatggcgtagaaatggcttcccggaatgcttctgttgtgtaagttactaactcactagatgcgaggccacagcctactaaatggcatgaatgtatcttttagcggctcattccagaagcatctgtgtaacagaaatgtcaggaattgaaaggaagcctgcgcggtggctcacacctgtaatcccagcattttgggaggctgaggtgggaggactgcttgaactcaggagttcgagaccagcctgggcaacatagtgaaaccccatgtgtactaaaaataaattaaaaaaaaattagccagatgtgatggcgtgtgcctgtagtaccagctacctgggagggtaaggcaggaggatcacttcagctcaggagttcaaggctgcagtgagccatgaacatgccactgcactccagcccagcgatgaagcgagaccctgtctcagcaaacaaagaaaccaacaaacaaaaaattgaaagtattgagccagaagttagtctgtggaaacattttccaaaacatagttaacatgtgaatgaaactttatgaaagtttttctttttttttttttggaggtggcatctcactctgttgcccaggctggcgtgcagtggcacgatcttggctcactgcaacctccgcctcccgagttcaagtgattctcctgcctcagcctcctgagtagctgggattacaggcgtccgctactgcgcccagctaattttttatatttttagtagagacagggtttcaccaggtggttcaggctggtctcgaactcctgacctcgtgattcccaaagtgctgggattacaggtgtgagccaccgcgcctggccagaagtttttctagatttccaaaagacttcaataacatcaccaatactgatttgtgaagctgaaacttgttctaaattataatgaatttttaaaaagttccatcaaccacgctagaggaaagataacttacttttctctttgtagacaaggatattgtgaaacatgcagctgaaaaagtaggaaacatcacagaggtgtgtcaggcagaaaattaataaaaacattacgttatcctttgggattttgcaatgtttgtggtatttggctcttttaaatatgtaatttgttattatttcatattctaagtaaactttcatgtcagtttttttttttctttaaactttattttcctttcttaaagaggtccctcctcccccatccccgcgctcaattcctttagctggatccttccagttcatgactgatcggtttaaaatatgggtcgttcaaaagccgtgtgaacccgggctagtggctatacctctctgagactgttttcttagtggtaaaatggaaatcataataactttgcagggctgttataaagtttaaataagccaagtcctgcaaaatgcttagtgcaggtttggaatgcaccaagcgatgacaaatctcaacctgtctttatgctgagaccactccccagtttccggagccgcggccactatctccccatgcgcatgcacacccggctctcccttccaggccctccccaccacgtgggcgcggcctaccctcccgcagggggtaataggtggagtcaaggggctacttccgggattctttcccttccactctggggaacaacctttttgtatgactggcagcattattagccagtagtgattagagaagagcccgacgttaggtgcctcccccaacccatttgggacagcctcttcttagttagccaattggaagttttggagggcgggttctcctctgggggagggacagagtgatgggcgtctcttttggctaatggaaacttggctgctggtaagctgtgaccaatcagaagcgagaacgccggatcctggggcggggctggagcttcgtcagttgaaccgctcgcgaggagggttgctagtggagaaggtgagaggccgcgggagtggcggttgcgcgggccgtggtggaggtcttaggtggaggggaaggggcttctctcgggggagagtgggctgcggtgggcagctgacctggccttgtaggaatcgggagggagggtgccctttaacaagggtaggcgcttgattgaggggttgtgaggctgagcgcagcatgtgagttgggggtgatctgtatatcgcaggagggtcttcaatggggaaagttgtaaagcaggagacagcagatggtaaaatatagagacgtccttggaatgcagcgtggcgatttagtaggaggttttaaggcagagggttattacagcgcactatgctttacaagctttgatttgggtgaaagtcgtgggaagaagcaatattgaggaagggagggaaggagacctccagggatgagcatgtactttaaagagatgtgaagccctattatgcctgtggcgtttgctatgtgctgtgcacctgccaagtgttttaggtgaattaactcttaaacttactctactgatggttaagaatgtgggctctggcgtcgggttgaatcccgaatttgaatcctggctctgccactgatcattactgtggctttgggccagttgtttaacccttctgtgcctcagcttcatcatcagtagaatgacatcatctctgtctataccattggctagcttcaccctctttatctaatgagaactcccacgtgtgtatttccagcctggatctctgccctgaactccagactcatatcatggccgactcttctctctttggaagttcatctgacattcagacataaacttgtcccaaaccaatcttgcgatttcttcctttcaacctccaaacccagttgatgggacattcatcctgccaggtactaagatcaagaagcttggagtgttcttttttttttttttttgagacagagtttcgctcttgtagcccaggctggagtgcaatggcgcgatcttggctcactgaaacctccacttcccagattcaagggaattacaggcgcccgccaccacacccagctaattgtttgtatttttagtagagaaggggtttcactatgttggccaggttggtcttgaactcgtgacctcaggtgatccacccgcctcagcctcccaaagtgttgggattacaggcgtgagccaccgtgcctggctagcttggagtcttcttcacttctcccttttgtcttacttatatatggtctagcagatcgcattagctctgtcttcaaaacacatccagaatccaaccatgcctcaccagctcctttgctaccactctggcctcagtttgtctcctgctcttacctggtttgttgcagtggccttccaggtgggctctctgcctctcactgttagggggatactagtagaacagaagtcaggtcaggttgtttctcctttcaaaccctctcctggctcccacattacactgcaaaagtcttcaccatatccacgaggccccaacctattgggttcctcctcctccctcccctcaactcccatcacttctctcattcccctggctcactctgctgcagccaccctggcctccccgctgtcatttgaacatagcgaacacattgccatctcagggcctttgtactcgctgtccctgaacgcactgccacctcagggcctttgtactcgctgtcctgtccttctggatcaggtcttttcaggtgtctgtgtggcttcttccacacctctttcaggtctccgctcagacgtcagcttcacaaccaggcatttgctaaagtactactcaagctaaaataactcctgtcactgtatggcccttcacttggctttatttttcttcataacaccactacctgatatagattattattattattttttttgagatggactcttgcgggtcacccaggctggagtgcagtggcgcgatctcggctcacggtagcctccacctcctgggttcaagtgattctcctgcctcagcctcccaactagctgggattacaggtgtatgccagcatgcccagctaatttttacatttttagtagagacggggttttgccatgttggccagggtggtctcaaactcctgacctcaggtgatccacccacctcagcctcccaaagtgctgagattacaggcgtgagccactgcgctgggcctattattattttttgagatagagtctctctctgtcacccaggctggagtgcagtggcctcatctcagctcactacaacctacgcctcccaagttcaagtgattctcctgtttcagcctcccaagtagctggaactacaggcatatgccaccacgcctggctaatttttgtaattttagcagagatggggtttcaccatcttggccaggctggtttcgaactcctgacctcaagtgatctgcccacctcagcctcccaaagtgctgagattacaggcgtgagtcactgtgcccggtcctcacatcaattactgttggtttatatccactgggcttcttggacctccccactagagtgtttgactccatgtgaatatggaacccagcacctagaagagcacatggtgtttaaaaagtgttgcttctcctatactgtcctcaccaccctttggggtctccctgtggtatggggcagggttgctgaactaggagggtcatgtgtggggtggtagggtcggaggtgggggaataaactgggcagattgtggcgcccaagggcagaaggaacctttagtgtctgaaggaacttggaggaaatgcagatttctgggcccacccccagagtttctgcttgtgtatagttgggacccgacctaggaagctgcattttcataagcacttgtggtaaggattatgttccttggccatcactgtgagaaacactgttaggctggttcagagtttgctggggccactgtggtgattgagacagctcctgacccagcctgggagtcagggagggcttcctgcaggagaggggattggagctgagacctggaggatgacagggaatgagccgaggggagaaaaccttggctgtatccccagtgtctagaaccccattccctggcatctcccgttaaattcacaagcagtccctgaagatacaagattgattaaaatggctctgccctcacgggctcctggtctgtcaaataatcaacagatcacacagatggtaacagggagtgccagccactgtttgaagcaccttatatacactaaataatttagttcaacaacaaccctataaggtaggagctcttattatcccgctttactgatgggggaaggcccagagagggcaagtactttgcccaaggacacaccaaggagaaaggcagctggaatctgaacccagaagtacccagcctgcagcatgtgccatgcttaaggtgtgaggccgcatttgggttagttctgggaggaaacaggaggtggtcagggaaggtcagctgggtaaggggaaggaagacgaatgtttctgtctttcatggtgggatcctagacaagcctcagtttcatcctctgtataatggggatggttataatacccaccagagagcagaatttagggtgagtcattcattgggttaataagtgtgcatggtccttatctaaggcaaaagtttgcctttgagagacagtgggagagggagttgatgccccagggggaactggggtgccgcagtgtgcaccgtagagatttcattgcttggttccccagagggcttctctgtctctacagtctatggggacaatgtggaaggctttggtctgtattctggggcagtgaagggggggttctatccagcctcaattcacccacgtggtggggaggtgaggtcagaatggggtcgggaagggggtcatccaggccaggccacgcgtgtgaatgtggggcggagggctgctgcaggagagagcccatctagggtatggctgggctggaatatgtgttggcggtggtggggagctgcagagtgtggggaaacagccatcaggtgtgggctgccaagggcagtgatttgcccgtgtctggtatgggaggtagtgatgtagatttgtctttggtgagcccagcgtggagagttttcagctccggccccggggtaagagctgtgaaatctgtgagctatctggggagagccatttggaaggtggagccaggggtggtgatgtaacgctggaaaggaaaggggtcatcctagtgaatgatgagagggagagagctgggggctgaaacactgggtgtaagtgtgccagcgccatgatgtcatgaggcccgagaagtgggtcaggtgtgtgggccaggatggggcctggagggcagccgcacagtgctcgcagggatggggtggtgacgtcatgggttggtgagggcggggcctcgaaggcaccgctgggatgcgtgaggtcaggaaggaggcagaggctgagaagaggaactgggagaggctcaggactggaatgaaatcagccaccaggatgagccactggtcattccgaagcaaggatggaggatgcaggtagagggacagggtcagcggcgggaggggagagggggctcagggtccggggaatcctagaagtggcggtggtggtggggtcagtggagaggaggggttgttcagagagggctctctaaagggaagagaggtggaaaatatgtgtgcgggtggagtgggggttgggggtggggttacaagcaatttgggagggaacagaatccaggtgaaatatgggagtgatggaatacaggctgaaagtgggatgtgtggagcagaaccttgagcaaatatgcgggaagaatgcagttggaataacggggtgcattgaagttgaatatgcgggagccctaggagaccgtgggtggctggtgtagggaggagagtgcggctgcctccctgcccccaaatctgggagagcaggatggaatgaaggggctttggacgggagagagggggctggtttccggggaatgtagcatgagggttgggctggaatatgtggagtgggaggttctgcagagaggaggggaaggggagtccagaattccgtggccatctgggggacaagtgacgggcagctggggtcagggaggccgtgtggagctggcacgggtgtgggatttattccatcagcagttactgagcacttaggacatgcctagaggaggggaaggggccgggcagcgggtgaagtttgtggaggtgagagaggtgtaagtgtgcaaggggaattgagtttaggcagagtattcggtggctcagtgtctgggatcagggcggggtgggggctaaggacaaggcaatgggatgccgaaaggggctgctcttcgcggggtgggtatggggggtttctgccgagcagtggggaaaggggagttggcggcggggatgcggtgtggcgggcccccttcctctgtgcggtctcctcccgggagttggggaccacgagtgggggcggtgatgctgtgcggctcctcaggtgttcagttccgtgggtgcctcctacgccttggtaacccggacggtgtcgccgctgataggttctgggagccggagggggtggggttgatgggcggggtttagaacacccagtggggcggggccagtgctgccacgcactgcattggggtcaggggatgtgggatatgcggcaatttgtttgcagcaagatcgagattattattttttatttatttgttttttctgagacagaatcttgctctgttacccaggctggagtgcaatggcatgatcttggctcacagcaacctctgcctcccgggttcaagcgattctcctgtctcagcctcccgagtagctgggattacaggcacctgccaccacgcccagctaatttttgtatttttagtagagacgaggtttcaccatgttggcgaggccggtctcgagctgacctcaaatgatccaccctcctcggcctcccaaagtgctgggattacaggcgtgagccaacgcacacggacgagatcgagattattaacctggacttatgaaccatcagagaatgaaagcacaattgccagaatgtgaattttccaggggaagggggtccccgaattcatcagcccttccaaagcactcttctcccaaatgaagttaagagctgtgatctagagagaggtgtctgtcaggaggtctagggcctacgccattgcccttgggcctctgagaaaagagatctgtggatgggcctggggggtggtaatttgggagccactgaaatgaacttgcaaaaggttttgggactattcatttatctgcagaaggctcagaaatttcattagattctcaaaggctcaaggactctaaaaaggttaaaaatcccttacctggagtttcaaggatcatcttttttgcctcacaatattgtattttctgatattagattttattttattttttgagatggagtctccccctgtcgccaggctggagtgcagtggcaccatctcagctcactgcaacctctgcctcctggcttcaagcgattctcctgcctcagcctccggagtagctgggattacaggcacggggcaccacacctggctaatttttttgtatttttagtagagatggggtttcaccattgttggccaggctggtctggaactcctgacctcatgatccacctgcctcgcctcccaaagtgctgggattacaggcatgagccaccgcacctggcctgctctgacccccttttaaaagcttggctcatcctactccaatacccccgtccctctttccagcttgacttttctccacaaatgtttgctgaatgaatgaatgaataataataaatatataatgagtataagacttaataaattaatactaatattaatcatgattctttttttggccatcatgtatttcttttctttcttttttttttttaactgagtcagggtctcactctgtcacccagactggagtgcagtggcaagatcacagctcactgcaagctctgcctccagcctcccgagtagctgggaccacaggcatgcaccaccacacctggcaatttttttgtatttttagtagaggtggggtttcaccacattgcccaggctggtcttgaactcttgagctcaagtgatcctcctgcctcagcctcccaaagtgctgggataacagttgtcagccaccgcgcccggcttggcaatcatgaatttctagtatccagcacatattggacacagcctccaggtcacagtaccaagtacttttatacatattgcccaatgtaatcctcacaacaagtccacgaggttggtgccattattatacccattttccagatgaggaaactaaggcacagagaggtgaattcgctttcccaggatgccacagctggtaaatgatggagccaggatatgaggcctggccttccaactcatgagcctgggctctgagctcctctaggtttctctctcatctccttctccagcaaccttggccatggaccagccggctggcctgcaggtggactacgtcttccggggtgtggagcatgccgtgcgggtgatggtttctgggcaggtgctggagctggaggtggaggaccggatgacggctgaccagtggcggggcgagttcgatgctggctgtgagtgtgcctgcctggggtgggctcacctttcctctcctgggatcagcttctcccagaatatcaggccaccctgaatcctgcccacctgcctcttctttgtcaccagaaactctccagtgtggggaggggtgtaggtcttgttgctcaagccagagacactggagtcgggtagaattgcagagcttaggtgcattgccctggggctgggcaagcggtcagacctcaggagagacttttctccccacccagtcattgaagatttgactcacaagacagggaacttcaaacagttcaacatcttctgtcatatgctggagtcagccctcactcaggtagggcccgggttggcgggttggggtgggaggggggttctgtcttccaggttccaggggggttgatgcccatctgatgtatgtaagaccctctaccttctctttcattgtgggaagagggcgatcattttcttcttttgccaagtgtaaatgcttcattttgaacttaatgatagttattctcatgtagaaaatttaggtcacagagaaatataaagaagaaagtaaaaatcactccagccctaatactcgcttctgttaatattttggtgaaaatcactccagtcctttctccatgtctctgtttgtttccaaatacgtgtgtgtgtgtgtgtgtgtgtgtgtgtgtgtgtgtgtgtgtatgcatttgcagatctgtaattatatatagtttatataatttccaaggtattctgcaacctgctttttttggtttgtttgtttattttttttttgagatggagtctcgctctgtcgcccaggctggagtgcagtggcaccatctcagctcactgcaacctccgcctcccaggttcaagcgattctcctgcctcagcctcctgagtagctgggattacaggcgcacgccaccatgcccggctaattttttgtatttttagtagagacggggtttcatcatgttgactaggctggtgtggagctccggacatcaggtgatccacccgcctctgcctcccagagtgctgggattacagacgtgaaccactgcgcccagcctgcaacttgcttttaaaggattcagcaatatctcataaaaatgtagtcacatcagtgaatatagccattcattcatttcatttgctgagcattgacagtgtgtcagtcattgtgggggacactggcgatacagcagtgaacaacagacaaaacccctgtcctcatgaggctgacattttggagagacagacaaatgaaaaaatacataatgtcaggtatttaaaagtttttgtttgtttgtttgagatggaatctcactctgtctcccaggctggagtgcagtggcgtgatctcaactcactgcaatctctgcctcctgggttcaagcaattctcctgcctcagcctcccgagtagctgggactacaggcgtgtgccgccacacccggctaatttttgtatttttagtagagatggggtttcactgtattggccaggctggtcttgaatacctgatctcaagtaatcctcctgccttggcttcccaaagtgttgcaattacaagcgtgagccaccgtgcccagcctaaaagtaataatcagggggaagaagcaggttagaacttagagtgacagggatgggtggtatttagatatcttttttttttttttttttttttttttgagacaagagttttgctcggttgcccaggcttagtggcacagtctcagctcactgcaacctccgcgtctcgggttcaagtgattctcatgcctcagcctcccaagtagctgggactacaggcctgcccaccatgcccagctaatttttgtatttatttatttattttttttgagatactatctgtgtagcccaggctggagtgcagtggcatgatattggctcactgcaacctccgcctcccgatttcaagcaattctcctatttcagcctcccgagtagctggaattacaggcatgcgccatcatgcccggctaattttgtatttttagtagagacggggttttgccatcttggccaggctggtcttgaattcctggcctcaagtgatccacctgcctcggcctcccaaagtgctgggattacaggtgtgagccaccgcgcctggcctggacaagcgatagtttcttaaaggttagttgcaatgtggaatctgcatcctcatcagtgaactttttgtattgttacattaaattccactgacttatcttgcattttgtatggatatttttttacctgtggatgatcttgtaacatcatgcattggtcatttggaaaatattggttcactaagttgtgcagattttccaaatgttgacacatttccttatataatatccagaagtcacatttgttaatatcctcaccgatttccccaggaaagtctgtgaacaccgagaagctatcagacacccagtggaagatacaagttttccaaaattctaatttcaagtgcaaagcttgaattttgttattggcaagacatcctgttagctgtttttcttgaagtgacaggctcactttgttcgtttttgagaaaatttctgccagatagcccgagtctaaataaccatagttttgtctgtcagtcgtttttttttttcaagtaaaaatagtgttctatgaaaagtggctaatttagctcaaaactcagatacagaagtgctttttcccgagaccatcgtcatactttggcgtgcacagaagtacttgatgtgtacttcccattttcttgctcaacataataaagagatgtgtgctctaggggctgaattcaataaaattaataatttttactgcttcatcaagaacattccgatgtttcatttcctgtgttttatggttgatttgcttatttacttgtttgtttatttctcttccccagccccccactgagactggggagatacaataacctccagtaccattcggtgccaggggcttgatttctcctaaggcaccagcagtttttcccaccattgcttttgtaccattcgcgcacatgtcaacacagtgaaaaagacaaatgacgtctttgtattattatgaaagtagctttgacctcagtggagatccctgaaagggtctcgtggaccccccagggatctggagacagcactcagagagtcacaggtctaagctgttctctctggttgagcatttaggttctttctggtttcttccttcgatgaagtccttgtgtctgccctaggacagggccatgttgattgccagccttcgcgtaggaaagcctagcccgcctagagaacgggaagggctgtggcccaggtgtgtgctaggtgccctccgtgtggcagtggcgggtgctgtggcagctcctcctctcctctcctgacagagtagtgagtcagtcaccctggacctgctgacctacacagacctggagtccctgcggaaccgcaagatggggggccgcccaggctccttggcccccaggtcggcccagctcaactccaagcgctacctgatcctcatctactccgtggagtttgacaggtggggagaagggtctggctccagggccaggctggtgggcggggtgggagaggatgtgggtaggccttaggaacccctggcacccaggcaaggtgatattggttaagccttgccttgggaatcttccctgttggggtttgtatcatttagtattgtgtttggctacaagtagcagaataaccatcaccagtgccctaaacaaacaatacatcaaacaaataatacgtcacgtaacaagatgtctaggtaggtgtctgccacctgtttaacagttccactagggactcaagctctttcttttttatttttttccttttactgtcgttaatgtgttggctttttttttttttgagatggagtctcactgtctcatccaggctggagtgcagtggtgtgatcttggctcaccgcaacctctccctcccaggttcaagcaattcttgtgcctcagcctccagagtagctgggactacaggcacccacaaccacgcctggctaatttttgtatttttagtagagacggggttttgtcatgttgcccaggctggtcttgaactcctggcctcaagtgatcctcctgcctcagcctctcaaaagtactgggattacaggcatgagccaccacgcccggcttggccttttgacttcatctttatctcttcatggccacaaaatagctgctggatcctccagacattgcatctatatcaaggcaggaagaagagggacagggctgagtttgttaattgcctttgctgtttttatcaggaaaaaaaaaagtgttcccagaagactcccaacagatttcctgtaatatgtggccagaggtggtcacatgcaagggatgctgggaaaatgaatatctggctttctagcctttatagggggagggtagcaagagagttgggaatggcagttgtgtagctaggtgaccgtgtctgtcccatgtgttagtagccactggatttcttagtggaaagttaccaatcctctgtgaatagcatctcatggggccgttaatcacaatggctcacctttccccagccaagccagggtcacccaggccaggccaaccagaatgccccgctgtggcatctgaattaggattgcgtttggctgcaagtaacatgataccagcattcccttcatcagcagtgggtgacaaggaagttcccccagactacaccagggctgccaatcccagtggtccccaaattgttatataagaggctttcacaggtggtgactggaacaaggggtccgggtacagggaggggccttgaggatgtgctcataagcctctaggacagtgcagtttttggaattgtgtgttttcgtactctgtggctctcagaggctgctgtttaccctcaggtgcattcttggcctctgagatgccacggttttaatcctccctcctcaggattcactacccgctgcccctcccgtaccagggcaagccagaccccgtggttctgcagggcatcatccggtcactgaaggaggaactgggccgcctgcaagggctggatggccagaacactcgggacacccgggagaatgagatctggcatctgcgggagcagtgagtcttggaggggtgggcagctggggcgggtgggggccctcccatcatgcaccgcggggcccatgctcggtcctgtggggaggatgactgtccttcgcccaccacgtattcttttttttttgagacaagagtctcactctgttgcccaggctggagtgcagtggtgcgatcttggctcactgcagcttccttctcccgggttcaagcgattctcctgtctcagcctcccaagtagctgggattacaggcacgcgccaccatgtccggctaatttttgtatttttagtagagaaggggttttgccatgttggccaggctgatctcaaactcctggcctcaagtgatctgcccgcgttggcctcccaaagtgctgggattacaggcatgagccactgcgcccggcctctgagcccctcttctgtacctttgtgctgggtggtgctggggacatagtggtgaccaagactatcttggcactgccctcctgggactctgagtccagggagggaggcagatgtgtttgcagacagtgaaggctctgggtggggtacctgaccctgcctggtacgggaggggtgttcttggcaaagggagcagcatgtgcaaaggttggggggaggtcgagctctatgtaggcgaatccaccttcatggggtgcaccttttgtgctagcccctccctgccactcacgtagtgcccagccctgggggagatgggtgctaagtatataaccacttgagtatatcattacagatggagatgagtagggcaggaaagggagcctgtgctgtgggaggctgtcacaggactccactggggtgtagggtgggtcaggcccaggggctggggaagtgttgtaggcagagggaacagcctgggcaaagtccttgtgttaggtgggaatgcggtgagaacaagggaatgaatgaagtgaaagaagcaaaggcctttggcatatatattcatgcctgccttgtgcttggttctgttggggagacgaatctggggcttgatcgctaccgggaagaggcctggctcgttggggaggactaataatatttttagtaataatgttaccagtaactaatgtttattgaacatttaactgtatgccagggctgctctgtgctttatgattaaattcattttatcctcacagccaccctacaaggtaggcactgctattatcaccgtttgacagaggcccagagaagttagggaacttggcgcaggtcacacagtgggtaatatggctaggctggaccttagatccaggcagccagcgccgagcctctgttgtttccccagctgtttgcactgttggtggctgcaagcccaggacagagcgctaagtgctgacccggaggaccagtccttatgggagctcatggggctggggaaccccgccggtctttggaggagctcgcctgtgtacggctgggccgaggaaggccgcagtggggaggccaaaatttatcctcaggatctgctctcaggctgtgtgtgtgtgtatgtgtgtgtgtgtgtgtgtgtgcgcgcgcgtttgctctgtctcaggctgtgtgtgtgtgtttctaggtttgtgtttctgggtgtgtgtttcccaagatggccacaagggggcgccctccaccctttggaaccaaccacaggagccttgagatcccaccgctgctcagtggcttcttatcttcctcttcccagccaggaattagggagtttgggaaggttctgagatttattcattcattgagccaacatttatggagttcatactgtgccaggcacactgcctgacgctagttaatgtttattatgctagacatggtctaagcactgtggatagattcttacagcctaacaggcgggcattcttattatcgtccctcttcacagatgagaaaagatggcctgaggctcagagatgtgaagtgaaactgcccagggccacccagcttgttaacaagtggaatagagttgaatgcagggcgcccggccacgcagcctggggtcctgtgcagtgaaccagacaggtggaggctctgcccccagaaaggtgggatccacatgggaaacggacactcctctacatgccaggtctgccagggctggtgctaggaaggaaaggtatagagggctgggagagcggagaacgtcaggggcaggtaggcttcccggatgagtggagtcgttcttgccaggagaagagggagagaaggttctgggaggtgagaactgcatctggctggagcctgtgggagagggaggcaggaggagaggaggggagaagtcagatgggcaggggctgaatagaaaggaaagctccttgttagagagtgtggggaaccacggattttaagaaggatttattaggaaaaattccagcaccacaaaagtaaacagtagtataatttgcacgtacttgtcccccagcttcaacagttacccacgtttgcccatcttgtttgatgtactgccaccccctgccctgtagcaaatcccagtcttcgtgtctcctctgtaaaagcatcagtgtgtatctttaacacataaggatataagtgctgccatcacatccaacaaaattcacaaaaattccaggatgtcatctgaaacccactgcgtatgcgttcacacttacacttctctgatcacctctcaaatgtcttttttgcaagtggtttgaattcgtcctgtatctaaatacggctgcacattgcagtttgtcgaggtctttcttttcttttctttctttctttttttttttttcagtcttgctctgttgcccaggctggagtgtggtggtacgatcttggctcgctgtgtccttacctcctgggctcaagcgattctcccacctcagcttcctgagtagctgggactacaggcacatgccatcatgcccagctaattttcatatttttttatagagacagggtttgcctgtgttgcccaggctgatcttgaacttctgaattcaagccatccacctgccttggccccccaaagtgctgagattacaggcacgagccactgagcttggctgatgtatttcttaaatctcttttaatttatatccccctctccacttttcatgctacttatttgtggaagaaatcaggttatttgtcctgtagagttttgcagtctagattttgctgaatttttccctagcaagcatactcagatggaaaaatgaaaaatagattttgctgattatatcgccatggtgtgtttaatgtccttctctgtcccctgtacttgcagtgaagtggtggctaaccctatataggtttaatcacatgtggggtaggttttggcaagatgcctcctttggtggtgttgagactgatgatttcagctgttgagagctggctccctcttttataaagttctcttcggcctttcaaccaatgcagtggttcactctggatatgcactcaaattgcccgggagctttgaaaaatctcagtgccctggctgccctgtacattcaccatttctttttctttttttgagaccgagtctcgcactgtcacccaggctggagtgcaatggcgtgatctctgctcactgcaacctctgcctcctgggttcaagcgattctcctgcctcagcctcctgagcagctgggattacaggtgtgtgccaccacacccggctgatttttgcatttttagtagagacggggtttcaccgtgttggccaggctgatctcgaactctcgacctgtctcaagtgatccacctgtctcagactcccagagtgttggaattacaggtgtaagccaccgtgcctggcctatttttctttttttaaaaattttgtgagcagtgaggagttccagggcaggccctgactcctccagacacaccacttacacctgaatctctgggatgggacccgtccctcctgcccaagagtcccactgcttccactacttaactttcttgttgtgaaaaataatatactccaaagagtataaaatataaatgtacggtttcacaaattatcataaagccagcgtacatgtaacaactacccaggttaaaaaattgaggctgggctcagtggctcacgcctataatcccagcactttgggaggccgaggcgggtggaacacctgaggtcaggagttcaagaccagcctggccaacatgatgaaaccctgtctctactaaaaatacaaaaatttagctgggcagggtggcgcatgcctgtagccccagctactcgggaggctgagacaggagaatcacttgaacccaggaggcagaggttgcagtgagccgagatcacgccactgcactccagcctgggtgacagagggagactctatgtggaaaaaaaaaaaaggagaaaaaaatcaaaagtagtcatttccccatagcctccgtatgtctttttccgggagagaccctcctgccccaaccatgctcccaaatgcaccagatctcactcacttgatttgcttatggttttgccagctgaactatgcatccctaaacaatatagtttagttgtatctctttttgcacttaatttaattttttttttttttttaagagacagagtcttgccctgtcacccaggctagagtgcagtagtgcagtcatggctcactgtcaactcagactcctgggttcagacaaccttcctgcctcagccttcccagtagctgggactacaggcacatggcaccatgccaagctattttttttttttgagacaaagtcttgttctgtcccccaagctggagtgcagtggtgcaatgtcagctcactgcaatctctgccttctgcctcctgggctcaagcgattctcctgcctcagcctcctgagtagctgggattacaggtgccccccaccagacctggctaattttttttttgaatttttagtagagagggggtttcaccatattggccaggctggtcttgaactcatgacctcaggtgatctgcctgccttggcctcccaaagtgctgggatgacaggcatgagccactgtacctggctgcaagctaatttttgtagagatggggatttaccttgttgcccaggcatgtctcaaactcttgggctcaaggtatctgtccgccttggcctcccaaagtgctgggattacaagtgtgagccaccacacttgacctacttatatgtcttttcttgtgatgaaaatcttagtttctagggataataacatatttatttgctttatcttaaacaataccagtgtaattactaataattgaattttgaatgaagtttaacatttccagggccgggtgcggtggctcacgcctgtaatcccagcacattgggaggctgaggcgggcagatcatgaggtcaggagtttgagaccatcttggccaacatggtgaaaccccgtctctactaaacatacaaaaattagccagggttggtggtgggcgcctgtaatcctagctacttgggggctgaggcaggagaatcgcttcaacccgggaggcagaggttgcagtgagccaagatcgtgccactgcactccagcctgggtgacagagcaagactccgtctcagaaaaaaaaaaaaaaagatttctttgcagttctttttggccttaggctatatcccgcttgctcaaacgatgtgttttagtcacctcctataattctccaatgtgccaccaactttgatatagagttaggtctgtttgggccagtttcttttaaaatttttgtgatggcatttgttaaaatttaattaattaatttgtataaaatatttttatagttccaaaactgaaaaagagggtacattcagagaggtccaatttcttacattttttaaaaaattatttttacttctggttttcttatttttttgagatgtgatccacctgcctcggcctcccaaagtgctgagattacaggcatgagccactttgtccagccagagaagtccaatttctgttcattttccccttccccataaataatccttttttcccccatagattttggtttattctgtaattttgaaaatataaacatataatttataattctcatttcttttatgaaaagggacattctgaacatactgtctgcaccgcactgtgtcacagcagtcactcggtgacaggacacagagatactctactttcctctttatagttttgtgggactcaattgagtagatgtattagaaattcaattagttctcttttaacatacattttggttatttccactcttttgctattacagattgtgctgcaatgaatagccttgtgtatacattttctcaaggaagggttttgagcatggtagttacctgatcaaatttgtattgtagaggatttcgtgactgggagactggcctggcgaggtgggaggaggagggaggcagtgctaggctttcagggtgtgtacagattgatgaaatcgtttagaattggaactcacatggctgtgttcccactccttcacccgcaccagggggaggagtgtgtgtgtgtgtcctgtgcgtggtggggtcatgtcctcttcgtgaggtgcatgggggtgatgtgaccacatccctcctcacacgtcgcaggggatatgataggaccctgcccctccccatggggtcagttgagactgatgagccgtgtacccccttccggggaggtgaaatgatgaggcgtcccacccccatggagtagtgggaatggggccatgcctctctctccagcgctctctccgcgtcttccccagggtgtcgcgcctggcgtccgagaagcgggagctggaggcgcagctgggccgatcgcgcgaggaggcgctggccgggcgcgcggcacgccaggaggccgaggcgctgcgcgggctggtgcgcgggctggagctggagctgcggcaggagcgcggcctcgggcacagggtggccggccgtcgcggccaggactgccgccgtctggccaaggaggtgagcagcgggggcccggggcggccagcgaggcgcggacctcggcctcagcctggacctccgcgcccctctcccctcccggcagctcgaggaggcgaaggcatcggagcggagcctgcgcgcccggctgaagacgctgaccagcgagctggcattgtacaagagggggtgagagcgaggcctgccaggcgcctgggcggatgggcgggccctgagggtgtggaggctgatgaggcggagcctaagggggcggggcggggccaggtagggtggagggggcggggctgaaggggaggcggggcttagcggaccccgtctggagtccagacaggatttgggtgcagtggttaggaggtggacccgggctgtgcggagatgcgcaggcttggggcggcgttcaggagggactgggaaagggatcgtgccctagggtctcctggtgcgaaagggtgcggcgcagcaggtgggatcagggtgaggtccgctggcatttatggggtgggtggtggaaaattggaaagagtttccggggagttgtggaagactccggaaagaagggtctgttgaaggcggtgtgttgaaaggatgtaggggaatgacagaggggtgttttaggggtccaattgggtgaggtctgggggggaagatatcgagagggtcatgggcccaggagtgcacgtctaggagttgatggggtaggcctgagggttcggagaaggtgcggtcggggaggagtctcgcgattgagtttgtcggggcgggcgggaagctgacagctgcctctgtggtctcaggaggcggactccgccggtgcagccgcccccgacgcgggaggaccgggcctcatcgtcccgggagcgctccgcgtcgcgaggccgcggcgccgcgcgctcctcatcccgggagagcggccgcgggagccggggtcggggccgccctgcgcgcccctcgccctcgcccacaggtctgtgcccctgccctgcggtagggaggggacgcactggcgctgccaaggcccgtctccggacctagccgcctcctctcccacgccgtcctaggtggtcgcgcgctccgcttcgaccccacggcctttgtgaaagccaaggaaaggaagcagagagagatccagatgaagtcagtgccccttcctccctcacctgcccctgtccctggcccgtgcccgctcccgggctctcatctctccacgccaccatcagtctccatcccctgccacctgctcgcttctcgccggataccccgcctgctctcccttccgtccgtcctacctcctcgtctgtgtttctgcgtgctttccgctcgtaggcctgtcacctcaggctttcgctggcgtggctgtgacctttaggggcgcagtgacccccttgcctgcaggagttgggcgtacagaccggcgtctcctttcttttttcccaggcagcagcagcggaaccgcttaggcagtgggggaagcggggacggtccgtccgtctcctggtctcgccagacccagccccctgctgccttgactggccgaggggacgcccctaaccgctcccgaaaccgcagctcctcaggtaactggcctggagctgggggctgccgggctaggcgggactgggcggggctgggcgggctgggaggcactgggcagggcgggcgggctgggagggcctgggaagcactgggcggggccagcgagggccagcggtcacgccctccgtctccctctagtggacagtttccgcagccgctgctcgtctgccagctcctgcagcgatttggaggatttctctgagtcgctctccagagggtaaaacttgaacttgggaaaaggatcgcctccaaagggtttctggggagactagaaacagtcttttgcagggaaattgggtgatggagcctgggggccttgaaaccacaaaggtcggggaggtgggaagtaccagagcctccccaccactggtccttggttactcctttttctcaggggtcaccgccgccgtgggaagcctcccagcccaacgccctggagtgggtccaatatggtgagtagaaggggcaacataaaccactggaacacagctgcccccatttcctgtgattccttcctggggatcaggtgcagaggcgactctgaatgcctttggcaatagggcttttttaagagtgcgtctcgctctttcaggctggggtgcagtggggcaattgtagctcacggcagctttcaactcctggactcaagagaccctcccacctcggcctatggagtagctgggactaggcttttttgggggggcagggtggggttgagacaggataagggggtggtattgtctctttatgttgcccaggctggtctggaactcctggcctcaagccatcctcagcctcctacagcgctggagttacaggctgggccagcgcacctggcctgggaacagcacgttttgagagcattagattggagaaggaataatgaggggcacgtgatgctctttagggctttggcttctgactgtcaggtcttgaaacctgtctcctcctcttcccagctgtatggttcaaggcagttctttagcctctctgtaccttagtttttgtttatcagttaaccagggttggtaatggcatcacctcacatgtgaggtgagggctctgtgaggacattaggaggttattttgcagataatgaatggccagtaggtgtcaggccttatttttccccaaggtccttaggctcaggatttccagtgggatttagggggacagaaatagagggacggtgggtgaccccctttcctaccttccccatcaccagaagtctccccccgtggaacgcagccaccatcagaaatctctggccaactccgggggctgggtccccatcaaaggtgagcctgggactccacatcccctctcccagccccaggacccgttggaatggtagtgcgggcagtggtatattgggcccaggaactccctggggcttcaggcccctcacagcccccatacccacacctgctctcacagagtacagctcggagcaccaggcggctgacatggccgaaatagacgcacgcctgaaggccttgcaggagtacatgaaccgactggacatgcggtcataacgtggagaaggggtactacccctccatcccccacccacttgctgggtatggtgtggggggtggggccagggtggcctccagccctgcccagtccctgccctggccccgtccctcctgctgcccctggggtctcaggtgtgtgaggccctgaccctgccctctccccaggcagtgcatgctgggagggaggatgtgtgcattttgtaaataaacatatttgccctggggacccctcagcttatgactaaagggtgagggtggagtggggagaaatgtggaggaagagaaattggggggtataattgggacctgtgtgtctgtgcctcggaggcagattgggactcaggcctaggaaaagcttgtacactctctaaacagtgcaagggcagacctgggaggagtagtgagcagcccgtccctaaaggagtccaagcaaagtttctgcgcaggatgcctttggctgtgtggtgggaaggaggtgtcttgcagcgtggttcactgcccaggaggacccccaggacccactgttggtgacatcccggccgccttggtgctgattcctgggctctgacctgagacctctgggttctgagctgtgatgttgctctcgagctgggatctccggggtcttggttcagggccggggcctctgggttccaagcaccagtgaggagagtgctgggaggggaaggggtgggagggctttggtcttgtgggagggagagaaggaggggaggtgtgtggtgggacctgctgaggaacacattttgagctacatctttattggagaaggagacagtggggtttttggccatgggaggggaggaatggggtgcggatcagcagggcctcagggggagcggtagtgtggccaattctggatgaggtggtagagctggttgcctggagagagtgtacgctgcacatcccggtgtcctttgagcacatagttggacctcagggctccctgagccacaccgcaggccagtagaccctgggctgcccggatggcctggggtgtgggcacccgatctggaggaggcagaggtaggagtcaggcaggggcttccccgaaggggaagtgatagcgtagggccccgtgtcagcccccatcccaactggctggacagtcactcacccatgtagttgcccatgaagctgatgccaatggacatggggttccataagtgacctgagtgggcacccgtgaagttccagccacggccctcgtatacgagcccgtcttctccaatcaggaagctgcatggggaggtgggggggcttgatgagtgagggagggtttcccgaggaggactcctcctccttcctccactcaccctgcctccgttactgccgtggtgcacacaacttccccagcatccttctcacccgttaatttcccacgatagtaacaatgactgtggtcatttattgggcccctgccatgtgccaagcacagctctgcatacacctttttccatcctcacagcaaccctgtgagtcactatcacccccgttttatatagacagaatcagagcggtagaatcacctgccccggggtcacacagcctgtctggggcacagctggggtttttaaccaggcctccatggtccccacccatgtgatcttgtgcgttgctctctcctgcctccctagaggatttgtggaagtcctgttttactgaatccttgcaggacagccctctgaggcagagacttttttttttttttttttttaagacggggtttcactcttgttgctcaggctggagtgcagtggcgtgatctcagctcaccgcaacctctgcctcctgggttcaagtgattctcgtgcctcagcctcctgagtacctgggattacaagcatgagccaccacacccggctaatttttgtattattagtagagatggggtttcaccatgttggccaggctggtctcgaactcccgacctcaggtgatctgcccgcctttggcctcccaaagtgctgggattacaagcatgagtcaccgtgcccagccaaggcagggactcttatcatcctcatcttaagcagagagagcagagactcagaaagcgacataatttgtacaagctactcagagccccctgcctctcagaactctgcctttgccccagcttgcttcctgccctcggggtccactgggggacaggatcacagactcaaagttggggtcgtaaccagataccgaccctggagccccagcacctgcctctttgaggttcccaagcctggcagcagatccttaaggctgattcattcagcacatctgattgagcgtgtctgacttggcaaatgggaatgaactagaagatcagtgccttggagctgcagtatgtgccaactcagcccccgcgctcacagtgtcattaatgacgcacagaatgtcggaacttccgaatcttgagtcccgaatctgctgcttaggaagccagctcccagaatctggccccagtgatgctggctgctgggactggctggttatggccctgctggtgatgctggctgctgggactggctggttatggccctgccatattcccggagcctggcatgatggtgctggggtcgggggtggttggttctccctggtcatttgttgcatgaatgcatctcattgaaacctcagccaccatcgccaagcgggtacagtcagaagccccatttacaggtgaagaaacgaggctcagagagagaaggtgacgtgacatggaaaggggattcagaacgttagaaccagattcggaatcctaaaagctgagggccagacagcggctgcttctgtatgtggtgatgtggacccgaggctcgggccttcgtgacctcatgggaacacttaggatcagagcgcctgagtcttggaaacaaaatgttgaagttggagtctttgataaaatcttgaactggaagggctgggaatacctttggacacttctagacttctctgggtgggttttgtgtgtgtgtgtgtgtgagacacagccttaggaggtcctgagaacatgtgtcccctgggtggggtctattgaagtggtctctggggacctgcatgttcctccaataagctctgcaggagattctgatgcttacctgggtctgagagcctgcaggattgaaagttccctccctgtggaaaccgtcaggctggactgcagcccattctaaggaggaggtagctggtaggcgtggccccggacctgcttcagcctgcttcagccggcaccccttacagtctgttctccccacagcagccagagggagtctcttgtacctacactagccctggtccctgctctgcggggggaagcctcccatggctcccatctcggagtaaaagctacagtcctcactgtggtccacaaagccctgcctggtcctgccctttcctcatttcattccgctcgcccggctgtgttcagccaccctgtccttcccacaggacccgcccactcaaccccgttggctttgcccccagcaccccctgccacctgcaggcctctgtctgctcccccatcccagagccaaggcagccactctcagggaggctttcccttgccccacccttccaaggagcctgtgtgggtctggtcccagcctgaggtcaccctccctcacctctttccttttatccatcgcctctatcaccgtctgaattcacctgtggccttggcttgtttctccctgctggtctttcaaccccaggaggctagagtggcaccgttctccatgccacatctggcacactgcctggcacatagtaggtgcctaatggtaatagcccgtggctttgcgggcccccgtgtgccaggcagttcctaggtgctttgcctgtattggctcatataaggagcagatgggccgcgattccattgactttgccgaggaggaagctgaagccgggaggacccgccccaggcctcagccagcaataagatgagctgaccctggaacccagctccgcactgagtcagcctggttttccgcctcctaacaaaggcaccaggcatcaggaaggggcgccttcataaggcgtcgcggacaccttggtgtgtgttaggcaaagcctgccccttcttcccgggagcgggagcggggcttggatttcagcccatccccccttctcacgcatctttgtgctgtgagcacctgccccggcccacgtggtgacccgaggaagaaatgaccttgtgaggttcagtaagctgctcagggtgtcagccaggtggcctcagcaccaggcctagaaatggtcccgctggcgggcacttgcacacctttgcctctgggatccccagtccagcccgtgcccccctgccacactcacttgtagcccacgtcgcaccagcccagtgtcttcatgtggtagtgctgcacattccgggcctgctgctggcacgaggcgggggtgttgcagctgctgcccgccgtgtgcgataccaccacatagcgtaagggcaggctcaggtgctgggcgcactctgatgccagggccttccactcgttccggggcactatggggctgcagcaggccgggtcttctgtctcctgagccgctccgagtcgaaggaggctggggagagcccaggcaagcagcatagagcggcgggacatagtggcagggcggcagggtccgggagaccgctaggagcgcccggtggaggggccgcctttatctgctgggggattccaggagtggcccggaaagtcttgcttcacaccctgctgggacttcctgctggcccagcagaccccagactcagcttccttctctggctgggccagggcgggatgcactgtggttggggtctgggtcacgcccacggcaatgacaggccccctcgctcagcagggagggacgcacaggcccctgggcgcttcgccccgccgtttctggaagacccggggccgggatcccggtcctgcttgtctctcctctcagtggaacattgaacaactcaacaggaacttacatcgcagaggcccggggcattggcacatcttctccccgcaaggactgaggtaacaaagctacccattttaaaaacacttccttcccccaggtccaagcctgatgccatttacgcttgcagcaaactcaagaggtgagtatctggaagtccatttcacagtggagtaaactgaggttgagagcagggaagtcacgggctgagacaccggaggcactggagccccgcgtctagagccaggctgcctgcatgtgaatcctggatatgcagtgtgtgagagcctgcaagtggtttttaaaaatgtgtatttaaaattttttttttaattttctattttataaataatattttcctttttttttttttttttttttgagatggagttttgctcttgtcacccaggctggagtgcaatggtgcgatcttgggccactgcaacctccgcctcctggcttcaagtgattctcctgcctcagcctcctgagtagctgggattacaagtgcacaccaccacgcccagctaatttttatatttttggtagagacggggttttgccatgttggcctggctggtgtcgaactcctgacctcaggtgagccacctgccagtgttccagagtgctgggattactataggcatgagccaccgtgcctgacctgtgtggtgtgttttcatcttctgtgttctgccttctcatatacattgtactcatgctgttactgaattgtgcaccaggcatctgtagcacttttcagaaattatcatatactcaacgacaagcttgccagatccatgttattattaacccctcttacagttgacggaactgaggcccggggggatgatcacatacaggaggtgatgaagccagggtttggctacaggctttctgcctgcagagttataaaccgtattctcctccctacaaacttatataaggacattaaaaaaaaaaatcaaaaccatgtgcatcaatttaccttttgtcacctaatatttcatgggcatctcaccagggcagtacatctaattctaatttattctttataatagttgcacaatatgctatagtatcagttcagcattgtggatcttttagtttttgaaggttttccagtattttctccacactacgcaaaatattttcagacatatatccctatgcactggtgcatttataagtaaattataaacacagagttattaggtcaatgagtatacatatttaattaatattaccagatcattttccccaaaaagccattaataattcatatttttcaccagtaatgttttggagcctcctcaccccgaccccagaagtgggtgttatcacttttttttttttttttttgagtcagagtctcgctctgtcactcaggctggaatgcagtggcacgatcttgtctcactgtaaacctccacctcctgggttcaagccattctcctgcctcagcctcccaggtagctgggattacaggcatgtgccaccacacctggctaatttttgtatttgtagtagagatggggtttcgccatgttggccaagctgatctcgaactcctgagctcaggtgatccacccacctcagcctcccaaagtgctgggattacaggcatgagccaccttgcctggccagtgttatcacttcttaaatttataagtataaagtgacagctcctttggcatttttatacccactcaggagactgggtatttttctgtatttgctgtctatatttgggcttgctcttttgtcaattacctgttcatatccattgcccattaaaaaaaattgggttgtttgcctttttgttattatttgcaaaatgaacaaaagaatcccataattgggatttttgacttcttgggtgtgtacattttgtgtatttcagtttttttagaagcattaaagaataatgtaatataaaaagtgtgtaaacacattttttatagagttgatagacttaatagagtagtgagcttatgagtgttcacgaagtgaatccacctgtgtatccagtgcctggattaagaagtagagctacacttaaaattttaataggaattggtaaatacaataccaaaaagattttagtatatatttttcccacaatatgatcagtttttaaatgttttactaatccaaagaacaagatctcattattgctttatttgcatttccttgaacattagagaggtgattatctttttacatatttatggctatcagcatccatcttcaaactgtctgttcatctcttctgatcattttcttgttgagttgtatatgggggatattaaccctatgtcttatcaaatgtgctgtaaaccctttcctctaatctgttaaaaaaatatctaggtttttcttttatggtttctgtgtttcctgtcttgccttaagagggacttttcacactaagattgtaaaactttttctatttaaaaaagattattttgtgttttacttttagatctttatctcggctaaaatgtatacttgcatgtggtgtgaggtaggggtctgatcttgtttccagatgcctagccgtttgcccaggttctgtttattatataggtagacctggttttaaatttccattctgccccttattagctacatgatcttgggaaattggatagcaattgacacagtcgaccacttcctccttctcaaaatacttatttcccttagcttttgtgatgtaagactgccttgattttccttctgcttctctggctggtctttttttctctctctctttttttcagagcaattcttccctcctggaccctcaaaccatatattttgtgctgagtgatcttatccacataatggcttcagccacagtcaaaatgcagaggattcctgtatttcaatgtctagtctggagctctcagttgagttctggatctgtgtatccacctggccacttgacgcctccacttggatgtcccacaggcacctccaatgcaaaatgactcatgaccttctcctccccatcagcactctcacaggagttcctgtctaaggaaatggtatcaccatcttcccattacaaaagccatacatttgagcaccatccttgactaattcctgttccttcctctgttgtacccagtacccaaaagaatgcccagcacatggtaggtgctcactaaatagctacttgattgaatggatatgcaacccaccaccaaggaatgccactgtgatgaattagaactcttctatctaattccattctctgcaccctggtccagacaccacctcctttcacctggattttgccctgcctcttcagtgacctcccaggatgcactctggcctctgtgaagccaaagctctgctcagatcttttctaaagtcaccctcaaaaatgagtcacatttttcattggcatctcttgattcctagaatgaggcccaagctcctccccatggccaacagcatgggctgcctacagtatgggctgcccccatcccagcctcaccttgcttactcccaaaagcctctttctgactcctgcagccactgtccccttcttgctgcccttgaacatgctttgactaccctgttcccttggggacttcagacacaccaggtataagttttaaatagaggaacctggaacgaattcaggaactttgtaccttagctttaagacaacaaaacaccaagccagccttttgtaaaaagacaggactatttacacatcacattcctttttttaatttttattttcttttttccctttcttttgcctgttctttcatttgaggcacagatcccttaaagacactaagaatataaacattagccagctggagtgaagccttccattgtgagagttttatttagtctgtatctttaaaaaaatgtatttacttatttattttttgagacagtttcactctgttgcccaggctggagtgcagtggcacaatcttggctcaccacaacctccgcctcttgggttcaagcaattcttttgcctcagcttccctagtagctgggatgacaggtgcccaccaccatgctcagttagtttttgtattttttttttttttttttttagtagagatgggggtttcactatgttggccaggctggtcttgaactcctgacctcaggtgatctgcctgcctcggcctcccaaaatgctgggattaaaggtgtgagccatatttacttacttatttttacatacaggtgtgagccatatttacttacttatttttacatacaggtgtgagccatatttacttatttttacatacaggtgtgagccatatttacttacttatttttacatacaggtgtgagccatatttacttatttttacatacaggtgtgagccatatttacttacttatttttacatacaatacaaacactttaaataaagttgaagatcatctccatggaccaggtggtcaagccgaacacccaggatccagctgtcaagttcagggtagcccctgagcttctcactctgactccaacagggtgagcttgctatccttgtggcacagggccttttgcattgtggatgatggagcggctcgtatagtccataagttttgtgcgtagctgtgtaccctgtccctgtgagctggttctgcccggcacctcggtgacctcgaggaaagaagctgaggtaagacctggcctgcctggctcctcgacttccttcctcagccctcaaattctggctcccacctcactctctaaatttatttttattttaaatttcattttagagacagagtcttgctttgtcacccaggctggagggcagtggcaccatcatagctcactgcagactcgaactcctgggctcaagggatcctcctgcctcggcctccaaaaatggtgagattatggacatgagacactgcactgggcctattgtgtatcttgttggcctaaaattgaaacatgccttgtgagcgtttactgcaacttcaatgagtgattattatgttgcctttaatcctgagagactgtattacttgtgcactttttttttttttggatagggggaaattagatttattccctatatgttttagaaaattgaagttttaaatatcagactcactagctgccctgatttaatctgttacaattaagtcagttaaaaaactcctccttggccgggcatggtggctcacacctgtaatcccagcactttggaaggccaaggtgggcaaatcacttgagatcaggagttcgagatcagcctggccaacatgatgaaaccctgtctcccctaaaaatacaaaaattagccaggcgtggtggcgggcgcctgtaatcccagctacttgggaggctgaggcaggagaatcgcttgagcccgggaggcagaggttgtagtgagctgagattgcgctactgcactccagcctgggcaacagagccagaccctgtctaaaacaaaacaaaacaaaacaacaacaaaacccccaggacttcctgtacccacattctagtggggaagacaggaagcaaattaacaaacatctaataactatttttaaaagccagatatacgatatttcacgtggatgacccgattggcctgctgcgggtcagggaaacaggctcccaggtcgcatcctcagcttgttcttggcgctggaaaaaagatgctacgcggttccctccttcagccaccagagggcgcgccctccccgtttgtcctctttcgcgcactttttctcccgcacctgtcagtcacagggcagccctttagcggaacagggatcctgttctgtgattttcctgagggcctgcctctcccagggagtagcgggctcctacgaacagtaatagcaaccataatgtagagaccaagagcagagttactgagttttatgctgatgtccaaagtcacagggcatttcatttttcttcttttttcctttcctttaaaaaaatgggctgggcatggtggctcacgcctataatcccagctctttggaaggccgaggcgggtggatcacccgaggtcaggagttcgagaccagcatggccaacatgatgaaaccctgtctctactaaaagtacaaaaaattagctggctgtggtggtgggcgcccgtaatcccagctactcgggaggctgaggcaggagaatcacttgaacccgggaggtggaggttgcaatgagccgagattgaaccattgcactccagcctgggcaacaagagcaaaactgtgcctcaaaaaaaaaaaaaaaaaaaaaagtgattgggtcgtgagagttctgttttcataaatgaattaatacattcatgaattaatgagttaatagatgaatgggttatcatggtagtaggactggtggctttataagaagaggaagagagactttagctagcatcctcagccccctcgccatgggatgccccatgctgcctcaacaccctgtagagtccccactagccagaaggctgtcaacagaaggaccccacagtttcagcctcagaactgtaagaaacaaattttgtttctttataaattacccagtttcaggtattctgttataagcaacaaaaaatggactaagacaggaatattactgggttaagaaataaaagtaaaaaagaactactattgatacatgcaataatctggataaatctcaagggcattatgctaagtgaaaaaaagtcaatctcaaaagatttcatactgtacaattccaattatataacttttttttttagacggagtcttgctgtgtcacccaggctggagtgcagtggtacaatcttggctcactctcactgcaacctctgcctcccagattcaagcaattctccttgcctcagcctcccaagtagctgggattacaggagtgcactaccacgcctggctaatttttgtatttttagtagagatggggtttcaccatgttggccaacctggtcttgaactcctgacctcaggtgatccacccgccttggcctcccaaagtgctgtgattacacgtatgagccacagcgcccagcctatataacattcttacaatgagaacacaacagagatggagaacagattggtatttgcaaagggacagatacagtgtgtttgtgtatgtgcatgtatatgtgtgtgtgcctgccactatagtggtaacacaaggggattcctttgtgggtctctatcttgattgtggtggtaggtatacaaatatttatatggatcagattgcatagaaacacacatgcacatgcgtgcacacacacacaggaatgcatgtgaaactggtgaatactgaataaggtcctctgtaatctagttaacagtaatgtacccatgtcactttcctggttttgatattatactatggttatgtaagatgttcccactgtgggaatactggatgaatgttacgtgggactgtatgtaccatgcaatttcctgtgagtctgtaagagttcaacacaaaaagtaattacaaaagaagaaaagaaaaggtgctggtgatgacaaggttgttgggaaaagggcttgtgcggtgcctgcataaactggccgtaaaaaatatgggacaataagttgtggaaagccacaggaggcctctgatgaggaaagccttctaattgccatcacgttcccatggccagagcgtgacctgctctcttatttacaagcactgtgctcaaggagaaagacactcctttgaagcattggaatgtggccagatatgccggctcctagttacgcccactccccacagctgctctccagtgagttaaagaataaatcagtagttaagtttatgctgcttcagcacaaagacaatttacctaaaccgccattgctatagattaggtgtatgacacaccgcccccctttcaccatttcacccctgaatatctgcttctcagatctaagtgattgtactcagtagtgtggagaccagagtttggcaccttttgcagcctccaaaagtgcagttggccccctggcaccccaccctttatgcactcttaacctgtctcttctcattccttcgtcgccaccggactttgggtaccctacgggtggtgttgaggctggtccccaacacaaggtgacagcagccatcccactccattagcaactgtggtgataagcactggtttaaaatgggctgaattgaaaactgttactcttgccttagtccagggattggcaaactttttctataagccccaggtagtaaatattttaggctttatggaccacatataatctctgttgcatattcgtttctctctctgtgtgtctgtgtgtctatgtgtgctttaaaatgttttataaatgtaaaaaccattattaactcattggctgtttaaaataggccacatatagtgtgtgtgtgtgtgtgtgtgtgtgtgtgtgtgtgtgtgcacataggtgagatttggtctgtgggttatagtttaccaacccctgctttatacaatatttctaaaggctggacatgttacgtcttctgactctggagttgttgacaatgtcttagccacctgttctgccacttggaagactatagaccagcagactaaagatatctctttataaggctgtgaactctggaaattcaatcacagctgctaatggaaacttctaagtccactagcagctgtgattcattattcatgtagatgctcatagtaatgatggcagcagtggcccgtctggagctgccactgccatcatgtgggctgcagtggggggcaggtggcacagttggggctgtacactccactagacggttggagctggggacaagtgggagccctgccccttccaagttggtggggcaggagctccccgggtgcagctgcagccacccaagtcatggctatggacccaggccttccactccatggagcaggcagaaaccccaccctcccaggtgcagctgcggctgcccaagttgtggcctccctgtgctcttggaggtgctgggagcaggcaggagccccaccttcctgggcacagctgtagctgcccaagtcatggctgcagacctggggctcccactgcatggaggccagagccccacccccccaggcatagctgcagccacccaagccatggctgcagacccaggcatctctgcactcttaggggcctgggaaggcactccctgccctcacaggcttagaagtgcctcctcctgctgcctggcttctccctgctgtcagcacccactgcaatcttagagcaaagttggggccgagcctaggcactgtcacagcctggctgggtgtgcacatacccggggcagtgctgacacaccagccccctgccacagccccctccagactttgggcaccgatgagcataggaggaaagctgagggggtgctgagggcagcttggtactggcctgcaggtgccctttggcataagcagcctgggcaccatggatggcagcaggaggcagacagcctcctgggcagaagggggcaggtcctggtgaggccccaccttgaggtcagggagggcctgaaggctgggggctgggctgccagtcccaggaccagaggatgaacctgtggtgcctttttggggcctattcatggccatctgtggagcaatcagcatgcacttcctcccctctgtggcccataaaagccccaggctcaaccagcacagggcagatgatgggacaaccagctgcagagcggagctatactttctgctgagagctggagcagatgatgggatgaccagctccagggaggagctaccctctctgttgagagctggacacttgttgggatgatctgcatgcagaaaggagctgcctgctgcaggagactgagctggtctattgctcagtaaagctcctcttcatcttgctcacccttcgcttgtctatgtacctcattcttcctggtcacaggacaagaacttgggacccactaaatggcggggctaaaagagctgtaacacaaacagggctgaaacatgccccttgcttaccacgctgcaggcaaagagaaggagacaagagctgtggcccttcagggagcccagacttgggagctccctgagccagggctatgactccctcttggggccctgcagctcctggtgtctccaggcatctggatgctaccacattccccagctccagccagggaagctgaagtgaggcaccgggtccagctgcagcctcgcagagagccggcaccatgctggcaccgggagctgcccgccccgtggcagcaactggcacgtctgactgcgcagtggctggaccccatgcttgctcacacacccctcgcagtcttccttggaggcatgggatcaaggccagtagtataagctgagtgcagcctgccaggccaagtgggcagaacgagcccagagggtccaagcaaaactcgggcaaaggtgccaccagccatgggtttctggccagaaaagcagcactccaaagatcctgtaacagtaaggacccattctctgatgagactgactggaatcaagctactgatcaaatttgcacaaccttcactgctgtcattgccatccggatccatcattgtaacacgctgaccttatggccatgcgaggagagcaaccctagcatctggggagagaatgccacatgctcacgaggcacggggaaggaagaacagtgctgtgttcgccccccagattcagcactgcagcccgaatcaagcaacagctgctgctgggtttgccaccccccacctacatgctatgaaaacagagaaactcgtttttcttttacttttcctttctttttttttttttttttgagatggagtctcactctgtcatccacactggagtgcaatggcgcaatctcggctcactgcaacctccacctcccagatttaagcgattctcctgtctcagccaacagagtagctgggattacaggcgcctgccaccacacccggctaatttttgtatttttagtagagacggggtttcaccatgttggtcaggctggtctggaactcctgaccttgtgatccgcccgcctcagccaaagtgctgggatcacaggtgtgagacactgtgcccggctgaaatatgtttttctgacatggctggtcctgaaccactctgttctgccttataccatcaatagcaccttccaaacgtggatcttcctcatatgtgcacaaacacatagactgatagacatcttgctttaatcggacatagaaatttatggctgggcacagtggctcacacctgtaatcccagcactttgggaagctgatgtgggtggatcacttgagcccgggagctcaagaacagcctgggcaacatggtaaagccatgcatctactttacaaaaaaaaaaaaaaaaatatatatatatatatatttatatatatatatatatggtagtgcatgcctgtagtcccagctacttgggaggctgaggtgggagaattgcttgggcccaggaggtgtgttgagatgagccagcatcgcatcactgcattctagcctgggtgatagagcaagaccctgtctcaaaaaaaaaaaaagctggacatgttgtattttaggttatgagactctggaaataatttaaatcttgttttagttggctctgtttgacaccactatagcaggggaaggaagttggggtgctgtctccactgccaggtcagggtagaagtccgggttcttgacagccttcattgatacctggtggggagagggtgaagagtgccttgatactgatgggttttgaaattcaggttccccttgtcgtccccactgatactgtgactctattcttggcactctctaaccttaacctggtgggataattaggattccttacagcccacaaagagactgaaaaaacaaaggtagaatatccaaggatgctgggacaactataaaaccggtaacaggctgggcatgatggctcatgtctgtaatcccagcattttgggaggctgaggagggtggatcacttgaggtcaggagttcgagacaggccggccaacatggtgaaagcccgtctctactgaaaatacaaaagttagctgagcgtggtggcacctgcctgtagttccagatactcgggaggctgaggcaggagaactgcttaaacctgggaggcagaggttgcagtgagccgagattgcaccactgcactccagcctgggtgacagagcaagactctgtctcaaaaaacaaaaacaaaaacaaacaaaacctgtaacattcacttaatggtaatattgatgacagcagtgggctgtctggtgtgaccgctgccatcacgctggccactgcagggagggtgcaggaaggaggtggacagcacttccacagctgcagtcttgggggctggcaccatgggattgggctgggtcgcctgtagcggggtggggagcagcgcagtgggagagcagtgccttcaggcacatcacaaagcattttcacagatagcttgtttctagtttttatggtgggataaaggggcctgatgcagatctggggccatgatttgggggcccgggctgggaagtgggagtggtgctctcttcagggtcccagccactggcgaagccactgtgccgaccttgctgagggtgctaggttcctggggctcaggagaaggatctgcactgcgccgctggggtctcctccctggtgtccacctgggcattggagtgattgccaaacctgtcactccaaatggcctggcccagggcccgtgatccactctgtcccaggccatccctgagtgccggggtaacgaggcagcttgtggcaatgtcgcccctaccccagatgccagcccaggcccagcgaggatcaggagtcccctccccaggctgtgagggggcacagccagagctacatgctccacagggcagccaggagccctgcccaagttgtggctgcagatctgagcctctgtgctcttggggggccaggagcaggcaggagccctgccttcctgggtgccactgcacctgcccaaagcgtggctgcagacccaggcctcctgctccatggagcaggcgggagcctcctcctgcccctgcagctgcagctgcccaaaccagcaactgcagcctcaggcattcctgcactcttgggagcctgagaagtgcccccctgcctttgcaggcttggaagtgcctgcttccgctgcctggcttctccctgttgttgtcgcctaccataatcttggagcaaagctagggctgagcccagcgggccatgaacagcagcaggaggcaaacagattcctgggtggaaagggccacgtccctggttaggcctcaccttcaggcctgggagggcctcatggctgggggctgggctgctagactcacaggccaggagcggggacttgtgattccttttctgggtgcccgtggtcacccatggaccaattggtatgcacttcctcccttctgaggtccataaaaacgatgggctcagccagaggagggcagaggatggagagatgactgaatgaccagctgagaagaggagccaccctctctgctgagagctgggaagatgacaggatgaacagctgcagataggagctctcctctctagggcctcctctttgctgagggctgaacacttgacaggatgacctgcctacagagaggagctacccactgtgggtctcttctgagctattctatcacttaacaaagctcctctttgtcttgctcaccctccatttgtctgtgtacctttcttcctggatgcaggataagaactcaggcaaaagtgccagcagccacagaggtttccagccagaaagagcaacaccccaaagattccataacaataccagaaggaaaaaaaaaaaaagaaatgaatggaagaaatgtttgaaacaataatgactgagaatttccccaaattcatgtcagacaccaaaccacagatccaggaagctcagagaacaccaagcaagataaatgccaacaaagcaagacctcatctcctgaaaggtgcttactttctgggagacacagatcccctcctggaagaggcccatgaccacacggcaggagttcctttccgagactgccaagcacctgtagcagtgcagaccctgagctctcttcatgcacagcagggccatcagcaggaccagggcaaaggtcttcatggcataggaactgctcattcttcctctcttgccagtcatttagtttcaataaactaaaatttgttcttagttttgtagcttaaaaaaaaactacaaataagccagtgcaatttccacaaccatgttgtcttgtacattttctgatgctataacagaagtggattggataatttaaaaagaacagagatttatttcttatggttctggaggctgggaagtccaaggtccaggggtccacatctggcaagggccttcttgctgtgtcaccccatggcagaatgcaaaagacaagagagcccatgcacacaagaggggaaaggggtctgaactcatcctttattttttatttttatttttttattatactttaagttttagggtacatgtgcttgtgcaggttagttacatatgtatacatgtgccatgctggtgcgctgcacccactaacttgtcatctagcagtaggtatatctcccgatgctatcccgcccccctccccccaccccacaacagtccccagagtgtgatattccccttcctgtgtccatgtgatctcattgttcaattcccacctatgagtgagaatatgcggtgtttggttttttgttcttgcgatagtttactgagaatgatgatttccaatttcatccatgtccctacaaaggacatgaactcatcattttttatggctgcatagtgttccatggtgtatatgtgccacattttcttaatccagtctatcatagatcgacatttgggttggttccaagtctttgctattgtgaataatgccgcaataaacatacgtgtgcaggtgtctttataacagcatgatttatagtcctttgggtatatacccagtaatgggatggctgggtcaaatggtatttccagttctagatccctgaggaatcgccacactgacttccaccatggttgaactagtttacagtcccaccaacagtgtaaaagtgttcctatttctccacatcctctccagcacctgttgtttcctgactttttaatgattgccattctaactggtgtgagatggtatctcattgtggttttgatttgcagttctctgatggccagtgatgatgagcattttttcatgtgttttttggctgcataaatgtcttcttttgagaagtgtctgttcatgtcctttgcccactttttgatggggttgtttgtttttttcttgtaaatttgtttgagttcattgtagattctggatattagccctttgtcagatgagtaggttgcaaaaattttctcccattttgtaggttgcctgttcaactctgatggtagtttcttttgctgtgcagaagctctttagtttaattagatcccatttgtcaattttgtcttttgttgccattgcttttggtgttttagacatgaagtccttgctcatgcctatgtcctgaatggtaatgcctaggttttcttctagggtttttatggttttaggtctaacgtttaagtctttaatccatcttgaattgatttttgtataaggtgtaaggaagggatccagtttcagctttctacatatggctagccagttttcccagcaccatttattaaatagggaatcctttccccattgcttgtttttctcaggtttgtcaaagatcagatagttgtagatatgcggcgttatttctgagggctctgttctgttccattgatctatatctctgttttggtaccagtaccatgctgttttggttactgtagccttatagtatagtttgaagtcaggtagtgtgatgcctccagctttgttcttttggcttaggattgacttggcgatgagggctcttttttggttccatatgaactttaaagtagttttttccaattctgtgaagaaagtcattggtagcttgatggggatggcattgaatctgtaaattaccttgggcagtatggccattttcacgatattgattcttcctacccatgagcatggaatgttcttccatttgtttgtatcctcttttatttccttgagcagtggtttgtagttctccttgaagaggtccttcacatcccttgtaagttggattcctaggtattttattctctgtgaagcaattgtgaatgggagttcactcatgatttggctctctgtttgtctgttgttggtgtataagaatgcttgtgatttttgtacattgattttgtatcctgagactttgctgaagttgcttatttgcactccagcctgggggacagagtgaaactctgtcacaacaacaacaaaatcaatgcagtataattaccaagtattagattctagagtgatctgtgactctgctaccccagaacagtctagatgaggtcagatcttgacacagggctttttgggtggtattcctgcagaaggagagaagtgggagaggggaataagagggagggtggtagcagcagtggcggggaaggaacagagacatggagaaagacagagttgcatggttactgagagatgggaaggtatggaacccagcagagactgcacatctgggtgggacatggacaaccaagctccattccctactcccccctcccacagcctggactggagtcagatccttacctgggcacagatcctggtgataggggaggacttgcaatctggcttcatgcctgggaccttgaacctcacaactgtctggttctgagagcccaaagactccaggcagcagtgctggaagcagggccagaaggtgcagctggagccgcagagccgggtctggttcaagtctaggatgacaccgtcatcacagcactgctccaaggggttgtaggtccactccccgcacctgggcgctggctggcatagccacagtctaagatctggaagagtcggggctggatgggctgcaaggaccagcctaggaccacctccccaccaaccttaatgctgttctctcctccctcactgcatctgttctcacctgtgactccttctgagtttgaacccaaaagttcaaaaatgaagatggcagctgagaagcagaaggagagcgagaatgattctgaggtcactaggtcttgaccacggggcacaggatgatgtctctgagcttctctggttgctgttaacagctcagagtggattttgggactggctgtgggtgcaggtcctggggactgggcttggcaggtgaggaaaggcagggagggctctgggaaaagttaagcttctggaatttgcagttcaggagacagattacaatgcagtcacagatgacatagcagtgattatgaggtgggacaccaataattaaatagggaagagagaattaactttgaagttcagaaataattagggatgtgatatcattagggattagcttagcctagggctggggtctccttaccagaaattctgggcaccatgggttaggcttcagagcagcggacgagggagcagcagtggaaatgggtcagtgactttacataggggcttatataggatatgaacttaccgccatttagggaggtgtgcagaaggagtggtttcttgggaagagttaggcaaaaagagctgcagggaacataaataattcatcaaaagcttaatgagatgcttctggacctgttccaagtggttgctgcctcctcagacccttcagatcctcagggtaaaggctacccaggaacctatctaagctttgactctgctgagtgtctttctttgaacaccgcccaagggaaaaccacttggaagatattccttaactcttgcttatctaagatcaaattactcaccaaacaccggctgtctctaggctccccatattcctccaccctgaagtttcaaggagtccctctactccccgtctcagttcacctgcagacctgcactgtctataatttttcagagtcacgtaggagaatttgtgaagttgcagcataatctagaagaacagcaggggctgcaaaactgtgccagggagaacaacaacaacaaaaataggcggtggtaggatggatctctgggattccagataggaaagcagcaccttttttttttttttggtttgtggagtgccttgtccaagaaaatgctcctgtgtgtctcactgtgtgatgggattacatgtggcgtatttttagagcatgcccctccattttccactggtttcttccctgtgtcacagtgagaagggtgggagggtgaaagaaggataaggcacaggtattagagctttgtaaaagtgcattgttagtatagactctctagagtctcttcctcctccctcctctctctctttttttttttttttttttgagacaccgtatctctctgtctcccaggctggagggcagtggtgctatctttgctcactgtaacctttgccccccaagttgaagccatcctcccacctcagcctcttgagtagctgggactacaggcaggcacctcctggcctggctaatttttttgtatttttcatagagttagggtcctacaatgttctggtcttggaatcctgagctcaagcaatccacctgccccagcctcccaaagtgcattgattttgttgttgttgtgcttatttgcactccagcctggcctctcctttcttgactggatgtccaagtcttcggtattgatttcatgcaataaactagctctcctcgcctatttctgcagttgcgtatttgcatagatatgtctgtttgtctgcttatcaatatgccttctcctttcccacacatccaaacagaaatcccacctgtaaagacacattctctcacctacacagaacagctgctgcggaaacagacctataagaactacattcctgtttatcaagttaagtagtgtgaataccgcattataactccgagccagcaaccaagaaatttatgaccacttgaaagggaaagctgcaatgaagagtacaagtgactaaggagggaaatcccaaagctgattactagaattgatctctgtataattgaactatctatgtagaaaatcccacggaacccactgtcaagcaagaggtgagtctgacagattctgttagtgacaaaaacaagctctttttagattcagacactttattacttacacagacagggaaagaaagagccacaggtgccagcaccatgtcccttatacagggtgacactgaaacaaaagggccagatgactgaacaagaataataggatgcctgttgctgagtagagaatccagcctgtggctccatggtatagggaggtagaaagcctcatccctccctagaagccagaggcagtgagaagctgtgtcatggcggcctcccttatccatagggaagtgagtgacaagtgatgctgtagcagcttcccacaagcctcccatgacctcacgttctgggaagaccagagagtgttctgccatgacatacatcagctacagttaatttcaccaacgtggcccacgtggagatgtttgaggtcgccggggcagtagggcagagccattaccgtaaacctacccccaaagctccgggaactaataagtaaatttagatggttgtagaatacaaagtcaacacacaaaaatcaattgtatttctcgctcctggaataagtggaaacaaaaatttagaggggaacaatgccatttataatgcccccctactgaaattgaatacttaggtatactgtaaatctaggagaacatgtagaggatatatatgcttaaaactataaactagtgattaaagtaatcaaggaaaacctaaatatagagtggtatatcatgtcatagtttagaatatggggctttttagctaagatgtcaattctctccaaattgtctacagatttaacacaattccaatgaaaacccaagcaggatttgtctcagatagaagcaaaataattctagaatttatctggaaaggcagtggaaacaagaatggcccaaacaattttggttgatgaaaaatgttggaggactcacactacccaatttcacaattactccagctacactaatgaagacagtatagtattggcaagtggagagatacatagatcaatggagcagaacagatttcagaaataaacccaaacaaacatggcaaattgacttttgacaaagatgcaaaagcaattcaatgtgggaaaagatagtcatttcaacaaatggtgtgggacaatgggcatgcatatgaaaaaaaaaatcttctaccaaagcttacacttcctacaaaatttaactccaaaatgatctagatataaaaagttaaactatacattttctagaagaaaacataaaaaaaatccttatgacttagggaaaagatacaaaaaacattgtccatttaaaaaatggatagatcaggaagcgggcaagatggctgactagaagcagctgtggtccaccgcactcacagagaggaatgaaaggagtgagtgaattcagcatcttcaactgaaatatacaggttgtcactctcaacccatggagaacgaagaaatgcagggtagggtgatggtccacccaggagcagtgtggaggtatggggactcctgcccccagccaagtgaagcagtgagtgattgtgcaaccctgcctgggaaaccatgcttctcccatggatatttgcaaccttaggatcaagagatccccacataagcccacgcccagagatttgggtccaatacacagagctgtgtggagtcttggcagagcggccacaggggcactcacagagacccaggagttttacgtactctggccctgggatctgcagcaagggaggacatccctccatacatatttctatgaagggggctgaatccagagaaccaagcagtgtcattctgtggaccccacttccacagcacctcacaagttaagacccagtggcttggaattccagccagccaacagcaacaggccggagtctgcctgggtcaggaccaagttcctggggtgggggtgtcgtgggggcagtcaccatctctgtggttcagtagactcagccattctagcctgccagctttggagaatacaaatggtccagatgaggaagggttccccacaacacagcacatctgccttgccagattgtagctagactgcttctttaagtggttccctgaccccattcctcctgactgggtgagacctcctaacaagggtctccagccacctcctacagggacgtttgggtcaacaactggtcagaggaaggagcaggctgccatctttgctgttttgcagccttcactggtgacaccttcaggtacgggaaaaacggaggcaaccagggtcttgaacaaacccccagcacaccacagcagccctgtggaatagtggcctgactgttaaaagaaaaacaaacagaaaacaccaacaacatcagcaaaaaagaccccacagaaacctcattcaaaggtcagcaacttcaaaaatcaaaggtaaacccacacagatgagaaagaatcaatgcaaaaatgctgaaaactcaaaaagccagagtgcttcttctcttccaaatgaccacagtacctctccagcaagggcacagaactgggctgagaccgagatggctgaattaacagaagtagttttaagaaggtgggtaataggccaggcgcagtggctcacacctttaatcccagcactttgggaggccgaggcaggtggatcacgaggtcaggagttagagaccagcctgaccaacatggtgaaaccccctctctactaaaaatacaaaagttagctgggcatggtggcacatgcctataatcccagatgctgaggaggctgaggcaggagaatcgcttgaacccgggaggcagaggttacagtgagctgagatcgcgccactgcactccagcctgggtgacaagagtgaaactctgtctcaaaaaaaaaaaagaaaaagatgggtaataatgaacttcactgagctaaaggaggatgttgtatcccattgcaaataagctaagaatcatgataaattatacaggagctgacagaatagccagtttagagaggaacataactgacccaatggaactggaaaacacaagaacttcacaatgcaatcataagtatcagttacagaatagttcaagcagaggaaagaatttcagagcttaaagaccgtccttctgaaattatacaggcagacaagaatagagaaaaaagaacaaaaagaactgaacaaaacctctgagaaatatgtaaagagacagaatctatgactgattggggtacctgaaagagacagggaaattggaaccaagttggaaaacatactccaggatatcatccaggagaacttccccaaacttgcaagacaggccaacattcaaattcagtaaatacagagaaccccagtgagatactccataagaagatttaccccaagacatataatcagcagattcttcattgtcgaaatgaaagaaaaaatgttaagggcagccagagagaaaggccaggtaacctacaaagaaaagcccatcagactaccagcggacctctcagtggaaatcctacaagccagaagagattgggggccaatattcaacattcttaaaagaatttccaacccaggatttcatatccagccaaactaagcttcataagtggagaaataaggtccttttcagacaagcaaatgctgtgggaattcgtcaccaccaagcctgccttgcaagagctcctgaaggaagcaataaatatggaaagggaaaacctttaccagccactacaaaaacacactgaaatacacagacaagtaacactatgaagcaaccaacaaaacaagtctgtaaaataaccagctagcatcatgatgacaggaacaaattcacacataacaatactaaccttaaatgtaagtgggctaaattcctgaattaaaagacacagaatggcaagttggataaagagccaagacccattgatatactgtcttcgagagacccatctcacatgtgggacacacataggctcaaaataaagggatggaggagaaatttatcaaggaaatggaaaacagaaaaaagcatgggttgcaaccctagtttctgaccaaacagactttaaaccaacaaaaatccagaaagacaaagaagggtgttacataatggtaaagggatcaattggacaagaagagctaagtatcctaaatatatatgcatccaatacaggagaacccagattcataaagcaagttcttacagatctacaagagacttaagactcccacacaacaatagtggaatactttaacacccactgtcaatattagatcatcgagacagaaaattaacaaagatattcaggacctgaactcagctctggatcaagtggacctgatagatatctacagaactctctaccccaaacaacagaatatacattcttctcattgccacatggcactcactctaaaattgatcacaaaatcagaagtaaaacactcctcgcaaaagcaaaagaactgaagtcataacaaacagtctctcagaccacagcacaacaaattagaaatcaagatttaaaaattcactcaaaaccacacaactacatggaaactgaacaatctgctcctgaataactcttgggtaaataatgaaatcaaggcagaaagcaagaaattcttgaaactaatgagaactaagagacaatgtacccgattctctgggacacagctcaagtggtgttaagagggaaatttatagcaataaataacccacatcagaaagctagaaagatctcaagttaacaacctaacatctcaactaaaagaactagagaaccaagagcaaaccaaccccaaagctagcagaaaacaagaaataaccaagataagttattggttaacagaaataagcaataactgaaggagatagaaacacaaaaagcccttcaaaaaattaatgaatccaggagctgtttttttgaaaaaatttataaaatagatagactgctagccagactaatgaagaagaaaagagagaataatcaaataaacataatcagaaatgacaagggagatattaccactgaccccacggaaatataaacaaacatcacagaatactataaacacctttatgcacataaactagaaaatctagaagaaatggatacatccctagacacatacaccctcccaagactaaaccaagaagaaactgaatccctgaatagaccaattatgatttccgaaattggggggtaataaatagcctaccaaccaaaaaaagcccaaagttggaagcattcacagctgaattctaccagaagtacaaagatctggtacaatttctacggaaactattccaaaaaattgaaagtgagggattcctccctaattcatcctatgagcccagcatcatcctgataccaaaacctggcagagatacaacaaaataagaaaacttcaggccaatatccttgatgaacatcaatgcaaaaaacctcagtaaaatactggcaaaccaaatccagcagcacagcaaaaagcttatccaccatgaccacattggcttcatccctgggatgcaaggttggttcaacatacgcaaagcaacaaatgtgattcatcgtataaacagaactaaaaacaaaacacacatgattatctcaatagatgcagaaaaggcttttgataaaatttaaacatccctttatgttaaaaactctcaataaactaagtattgaaggaccgtacctcaaaataatagaagccatatatgacaaactcacagccaatatcatactgaatgggtaaaagcttgaagcattccccttgaaaactggcacaagacaaaaatgccctctctcaccactcctattcaacatagtattggaagttctggccagggcaattaggctagagaaagaaataaagcgtattcaaataggaagagaggaagtcaaattatcttgtttgcagatacataatcctatatctagaaaaacctcatcatctcagcccaaaagcttcttaaggtgataagcaacttcagcagtctcaggataccaaatcaatgagcaaaaattgctagcattcctatacaccaacaacaggcaagcagagagccaaatcacgaatgaactctcattcacaattgctacaaaaagaataaaatacctaagaatacagctaacaaggaaagtgaaggacctcttcaaggagaactacaaatcactgctcaaaaaaaatcagataggacacaaataaatggaaaaacactctatgctcatggatgtgaagaatgaatactgtgaaaatggccatactgctcaaagtaacttatagattcaatgctattcccattaaactactattgacattcttcacataattagaaaaaactattttaaaattcatatggaaccaaaaaagagcccaaatagccaagacaatcctaagcaaaaaagaacaaagccagaggcatcacattacctcacttcaaactatcctacaaggctacagtaaccaaaacagcatggtactggtataagaacagacacataggttgatcaatgcctcctggtctctgatggccatggctgggaatctctctgtacaaaaagatgacagataggaggcaggactaacttgcagctcccacttggagggacagagaagcatgtggagacccacatcatgaaatttttctccaagaacaaccacaggaacataccaggaaagctgagagaatccagagaccctttaaaggaggtggattgctgctgcagattatgtgggacaatcaagaaactgtgagtttgcttgctttctcagctgggaggcttgtagcctggggcaagttctcagtcctgctcactggctgcctggaaataaacttggtgctgttaggggggcatagtgggagtgagactggccttttgggttgtgggctgcatgggagctgggtgaggtctgtgattgctggttttccctcacttccctggtgacctatgtgatgcagcagagatagccataattcccctgggaacataactccattgtcctgggaaccacacccccatcccctatagcagccacagcaagtccccgccaaggagattctgagctcagacatgcctaatgctgcccccacctgattttctctatcggccctgggagcagaagacaaaggacacagtctcttgggagctctatagccctgcccatcacctgagaaacctgaatactcattcaaaggtgaccctagggcaagtttgtatcctccccacacaaccacagctgacgcgctcttaaaagcgccacctcctggctggaggccaaccaacacaaaccagtgcacttaacacacatacagccaaggaccctcacagagtccacttcactcccctgctacctccaccagggtaggtgctggtatccacggttgagagacctaaagacggatcacatcatgggactcttcgcagacactccccagtaccagcctggagtcctgtagctccactgagtggctggatccagaagagaaataacaatcactgcagttcagctctcaggaagccccatccctaggggaaaggggagaggaccacatcaaggaagcacccctctgggacaaaagaatctgaacatcagcccttcagcctcagatcttccctctgacatagtctgcccaaacgagaaaggaacagaaaaataattttggtaaatatgataaaacaaacctctttaacacccccgaaagatcacactagctcaccagcaatggatccaaaccaagatgaaatctctgaattgccagaaaaagaattcagaagatcgattatgaagccaaccaaggaggcaccagagaaaggtgaagtccaacttaaagaaataaaaaaagatacaggatatgaatggaaaaatctccagtgaaatagatatcataaataaaaaacaatcacagcttcttgaaatccaggacaaacttagagaaatgcaaaatgcactggaaagtctcagcgatagaatcaaacaagtagaagaaagaacctcagagcttgaagacaaggctttcaaactaacccaatccaacagagacaaagaaaaaagaattttaaaaaatgaacaaagtctcctagaagtttgggattatattaaacgtcccaacctaagaatagttggtggtccggaggaagaagagaaatctaaaagttttgaaaacatatttgagggaataattgagaaaaacttccctggccttgctagagatttagacgttcaaatacaagaagctcaacggacacctgggaaactcatcacaaaaagatcatcacccaggcacatagtcaccaggttatctaaagaaaagatgaaggaaagaatcttaagtcctgtgaggcaaaagcatcaggtaacctataaaggaaaacctgtcagattaatagcagatttctcagcagaaaccctacaaattagaagggattgaggtcctatctttagtctccttaaacaacgcaattatcagccaagaatttttcattcagtgaagctaagcctcataaatgaaggaaagatacagtctttttcaggcaaacaaatgctgagaaaattcactactaccaagccagcactacaagaactgctaaaaggaggtctaaatcttgaaacaaatcctcaaaatacaccaaaatagaatctccttaaagcacaaatcttacaggacctataaaacaataacacaatgagctgggcacagcggctcacacctgtaatcccagcactttgggaggccaaggcgggtggatcacctgaggtcaggagtttgagaccagcttggccaacatggtgaaaccctgtctctactaaaatacaaaaatcaggtgggcgtggtggcaggtacctgtaaatcccagctactcaggaggctgagacaggagaatcacttgcacccgggaggcagaggttgcagtgagccgagatcgtgccgctgcactccaacctgggtgacggagtgagactttgtctcaaaaaacaaaacaaaacaaaacaaaaccaaaaaataataacacatgatgaacatgtagtattgagatgtgagaatagtacctcacatctcaatactaatgttaaatgtcagtggcctaaatgctccacttaaaagacacagaatggcagaatgcataagagctcaccaaccaagtgcgtggctgtcttcaagtgactcacctgacacacaaggactcacataaacttaaggtaaatgggtggaaaaagatatcccatgcaaatggacaccaaaagggagcaggagtagctattcttatattagacaaaacaaacttcaaagccacagcagttaaaaaagacaaaaagggatattatataatgataaaagaactagtctaacaaaaaaatcacagttctaaatatacatgcacctaacactggagctcccaaatttataaaacaattagtactagatgtaaatactgagatagacagcaacacagtaatagtgcaggacttcaataatccattgatagcactagacaggtcatcaaggcagaaggtcaacaaagaaacaatggacttaagctataccctagaacaaatggacttaacagatatttacacaacattctatgcaacgactgcagggtatacattctattcagcacagggaacgttcagaattagcttagaccataagataggccacaaaacaggtataatagatctcaataaatttaaaaaaatcaaaattatatcaaatactctctcagaccacagtggaataaaattggaaatcaactccaaaaggaaccttcaaaaccatgcaaatacatggaaattaaataacctgctcctgagtgatcattgggacaacaattaaagatagaaattgaaaaattctttgacctgaatgataattgtgacacaacctgtcaaaacctctgggatacaacaaaagcagtgtagcattaaatacctacatcaaaaaagtctgagcctggccaacatggtgaaaccccatctctactaaaaatacaaaaattagctgggtgtggtggcatgtgcctgtaatcccagctactcgggagactgaggcaggagaatcacttgaacccaggagtcggaggttgcagagagccgagattgcgccattgcactccagcctgggcgacaacagtgaaactccgtcaaaaaaaaaaaaaagtatattaatcccagcctaaaaaggcagaaatatcaattgctttgcagacatgaaaactattaacacatacttaaaatgtacattacatgttttattccctagaattctacaggtatttatatgttatctcgttttttttttttttttggaaatgcttgctactctgtatcagcaaacatcccagggctcgaagtagtgggaattgaaaagctttgggagaagtcagaaaagaaaaaaaaaaaaaaaaagcaggaggaaccctcggtggaaagtatgcatagacagtaaacatgccaacggaggcccatctgtttctgtaccctttatgcaacatgtctgtataattggggataggcaagttgtataattggggttggctaataataacaattatttgaagtggggaatattagtcacttacactgcaatatagccagggtatctgtgttacttcacttggttctgatttaaatgatctgttttgttttgttttgtttgagacgttgtctcactgtgtcacccaggctgaagtgcagtggcatgatctcagctcactgcaacctccacctcccaggttcgagtgattctcctgcctcattctcccgagtagctgggattacaggcacccaccaccacgcctggctaacttttgtatttttagtagagccggggttttaccatgttggccagggtggtctggaactcctggcctcgagtgatcccacctacctcagccccacaaagtgctgggattatataccatattttctttattcattcgtctgctgttggacacgtaggttgattccatatcttggttattgtgaatactactgcaataaacatggaggtgcagatgtctcttagatatactgatttccttttttgtgtgtgataaatgcccagtagtaggattgctggatgatatagtggttgtttttatagtttttaaagaacctccatactgttctacatagtggtggtattaatttacattctaatcaacaatgtgtaagagttcccttttctctgcatccttgccagcattattttttatctttttgataatagctaacctaactcaggtgagatgatacctcattatggttttaatttgcatttccctgatgattagtgatgttgagtagttttttcatatatctgttgcccacttttatgtcttcttttgagaaatgtctgttcagatcatttgcccattttaaaatcaccttgtttgtttttgctattgagatgtttgagttttttgtatattctggatattaatgcctagtcagatgaatagttttcaaatattcttccattctataagtcatgttttcactctgttgtttgttgtgcagagctttttattttgatataatcccatttatttatttttgctttcattgcctgtgcttttgaggttttattcataagatattttctcagactaatatcctgaagcattttccctgttttctactataagttttgtagtttcaggttttacatgtaaatctttgaatcattttgagtttatttttgtatagggtgatccatgggagtctagtttcattgttctacatatggatattcagtctccccagcagtatgtattaaagagactgtcctttccccaatgagtgttcctggcacctttgtcaaaatcagttggctatagatacttggattaattttcaggttttctgttctgttccattggtctctgtgtctatttttatgccagtgccatgctattttggttacgacagcttcgtagtatattttgaggtctggtagtgtgatgcttccagctttgttctttttactcaagattgctttggctttttcaggtctcttgtggtgtactttcatatctctactttctcaataatacctcaaaagccattttttttcatatgatgcccacaccaaagaataaacaaagacataaatacctcaaggacctaatacctaaaaaattgagcctctgtaatctcaaagagaaagtaagaacctgagggttccaagggaagatgaatgtgaggaaaacagtgagtagcctagagataaaggaatagaagatctatagtcttcaaagttggaagataaaggaagatggccttctgtcttcaagaacaaaatttgaaatggagggaatcagccctggagctattgctgatgtgtttgccaaatcaatacatccctttatcatccttcagtatgggtatttatagggccacttgaagagagcctatagccaacttggacatctttggtgtcttggtgactaaggagggaaacccagtttctctcaaaagggaaatgaagagaactgctgtatatgtcccctatgaaccatgggagcagtaagtaaaacttggtaaaggtcatcaaattagttctgccaggctctcacctgtgactgtgaaggcacctcatgtaaagtaacatgccttcctgggaatggcatttgataacagcagatttgttctcagtaatatgttttcttttcatttcatttcttttctgttcttttccagatagggtctcactgtgttgcccaggctggcctctaacttcaggagttcaacagtttctcctgcttcagcttcctgggtagccaggacaggtgtgtgccaccaggctaatcttcagtaacgtgttttctttgatctatcattgcatgttttgttagcctcccatggctggattgaatcttgaatacctcccatgatcttatcacacccatcttaactagaatatttccattcaacattgtggccacaaattttccaatcttttgaaatgaggtcaaagctcttcatttgaatttgcttattagtgtttacctatattgaaaaaaaactacatcattaattgcatccttcagttctggtccttataagtggaaagagagctttagagatacttggaaagatcagaatgtagaatcatagatatttacactttgttctcaatattttacagctgaatggtaaaaatttaatttgacagcaaaaagttttgtgagagctcagtttaatttttttttttgacgaagtcttactcattctgttgcccaggctggagtgcagtggcatgatcttggctcactgcaggctccacctgctgggtttaagtgattctcccgcctcagcctcccgagtagctaggattacaggtgcccaccaccgtgcccagctaatttttgtatttttagtagagacagggtttcaccatgttggccaggctgatctcaaactcctgacctcaagtgattggcctgcctcagccttccaaagcgctggcattacaggcgtgagccaccatacccagcccaatttagtttttatataaaggtggcataaatggtaacaccatctttcaaccttgaactttccaaatgcaatcaataggacttgcagaagtaatagggaatattaactaaactaaggctgtgctacaccatgtggtttaactttagattaattgaaattaaataacatgaaaaattcagttcctcagctgcactgttcacatctcatgtgctcaattgccatattgtctagtggttacaacattagacatctcagatacagaacattctgatcattgccgaaagttccattggacagctaattagagtcccttatatgaagttcacctcaggaggctcatactggaattaagaggcatttcaattattctccaattccatcttgtactgcatcaatgtgccccagcaaggatctcctccactcgctccctatgtatccagggatcccctggagttttagtgtctgctgtgacattctggagatgcctcctgatgaattggaaaaatactgacatgggtgaggtctggtggtcaagaattgttggatgcttgccagcccatgaatacacaatggatacacagagagacgaggaggagtcaggaatcaaaggcaatgaaatatttccacttagggctgcaagcccgtccaggcaagtcctccctttgagctggaattctttttacatctacccagccacagaagacagaaatggagcccattacgtcatttctcaacttgctattcctccagcatattccttgcataagactccctgtaggatctcaccgaaggaggacacaaattcctgaaacctttgacctgaccctcttctctccctatacaccccagtcactcacttttgatcatgtgcaccctctttgtcttaggcttcagagtcccaaaggctgttattttcttcctttctggacaataaggtagaaaaatttgaaaatatgtgaagatctccaaggatttgatacaaatgaccaaaagtacatctgaatatgagaactttgacttttctttcaacttatgtagtaataagtacccattaaaaatgttaaagaatcagtctcaacatattaaaaaccttgagacttaaatatagaaaataagaaatacttcttctactattttcttatgtttttttcttgtggggcagggaggtagtggactcttaagcttaggagtctagagagggcaagagaggctcatttttagagtaaaaatattaaccacatttttcctcagggctgaggaaagaatacaccaaaatatagctgtggtttataactggatttgagttggctgtgaaggggaatttgaaactttttgtatccagaaacatcaatggatacgattttagttccccataaatcagccgtgctaacattcatgtataataataattattattttttaaagtgaaagcaagtttattaagaaagtgaaggaataaaagaatggctactccataggcagagcagccctaagggctgctggttgcccatttttatggttatttcttgattataagataaacaaagtatactagtctgctctcatgctgccaataaagacacactcaagactgggtaattgatagaggaaagaggtttaattgactcacagtttcacctggttgaggaggcctcacaatcatggaggaaggcaaggaggagcaaagccacatcttacatagtggcaggcaaagagagagcttgtgcaagggaactctcatttataaaaccatcagaactcttgagatttattcactaccatgagaacagcatgggaaagacccgtccccatgatttaattacctcccactgcatccctcccatgacaggcgggaattatgggagctacaattcaagatgagatttgggtagggacacagccaaaccatatcattctgcccccaacccctcccaaatttcatgttctcacattttaaaaccaatcataccttccccacagtcccccaaattcttaactcatttcagcataaacttaaaagtccatagtccaaagtctcatttaagacaaggtgagttccttccacctaggagcctgtaaaatcaaaagcaacttagttacttcccagatacaatgggggtacaggtatcgggtaaatacacccattccaaatgtgacagactggccaagatggaggggctacaggccccatgcaagttagaaatccagcagggcagccaaatcttaaagctctgaaattatctccatggacaccatttctcacatccaagttatgctgcaagaggtgggttcccatggtcttgggcagctctgcctctgtgtctttgtggctgctttcactcctggtgttgagtgtctatggctcttccaggtgcacagtgtaagctgttggtggatctaccattctggggtctggaggacgctggccctctcctcacagccccactaggcggtgcctcagtggggactctgtgtggggtttcaagcccacatttcccttcttcattgccctagcaaaggttctccatgagggcgctgttcctgaagcaaacttctgactggacatccaggcatttctctacatcctctgaaatctaggcggaggttcccaaacctcaattcttgacctctgtgcacccgcaggctcaacaccatgtggatgctgcctaggcttggagcttgcaccctttcaagccatggccccagctgtaccttggccccttttatccatggctagagcaactgggatgcaggatatcaagtccctaggctacacacagccaaatcatatcacaaggggtggattattcatgaattttccaggaagagtgggcaattcccagaactgggggttcctcccctttttagactatatagggtaattttctgatgttgctatggaatttgtaaactgttttggtgtgggtaggagtgtcttttagcatgctaatgcactgtaattagcatataatgagcagtgaggacaattagaagtcacttttgttgctatcttggttttggccggcttttcttactacaacctgttttatcggcaaggtctttataagctgtatcttgttctgacctcctatctcatccggtgagttagaatgccttaaccatctgggaatgcaacccagcagttctcagccttgttttacccagaccctattcaaggtggagttgttctgattcaaatgtctctgacatttcccccctcccttttacaaggcaactcttaatcctaagggttgtggaaggatgaagatccatattctgtaacttcttcaggctgaataggggcaatgctttcctgcctaactgttagggtctcttgtattcagggtagagaggagctcagaaagcataattatggtgagggtcacttgtaactccgagttctgacaaaaggtggtatctgtcttgtttattctgaactgcaaccagagatcactggttggctcacaggaataagcagtcagtctaaattgcagaagaaaaccctcaaaaacaactgatgagattagaatctaataacaggtgtaccatagttcttgaaacataatttttctctctccagtctcccattttttactaaagacaaatcatggcaaaaccaatttgctttattatacttggcctaattatttgtataaagtgcagcaataataattatttttcacagaggcttttaaaattgactttgatggaactgtgtttcataaaatgaatctcagataagactttttaaaagctgagcccagccgtgagtttgcaccctcaaatacctgagttgggtaaattcctctcctcttgaggtcccaagataacctggggctcctgggccaatcagaaagtgacattctttacttaccacaggtcgggaaccctgtacagggactgtgtagacaaggcatgaggccaggtttcccaaggggcttttattggctttataagtcaagtttgattccttaaaggaaaacataccattccaatcaaagctttggtaaaatcaccagtttctccaattgtgtctgtttgcaaaagaaaacagatccttattgtacttatgcaaataactatattgctataagttaagaatactcacaaatagtttccaaattttggagaaatcaggcagagagaaacaaatatgctccaaattttgttcacaggagttaagctgtcagtagctcaaaagaaaagtttccttgactctgaaaaacaaaacaaaggatccgcaacattttaagcaaaaagccgaaaaagatcacctcagtcctctattagttcagtccatacagataacttctgttctgtttgatattcatgaacatttcagctctccatgagagtcctgaaagttttttcctgtattctaatgtcacaatctccaaagttatcagaaaacctgcatttaagaatatctgctagagtcctatagctgattacaaaccaccttttgaagaggattaaaacaagaaagcaatgatctgtggatgacataaagtcttaggacagccatagtcaaagatacgattgacaaagatatttggttaccttgtggcacacaataatttaacataacaattgtaattattactgataatgtacactaagttatattagaataataagagtttctcatgatttgggaacacataccaatacatatttacacaaatacagcccaaagaaagccaaacatcatttcatatttgacagtgtttcttgtatgatttttgtatcaaataagccaaatgccacctttgcattagtgtactattaatgttaaacctaattcttaataaaattttatagacaaatctatttaaccttaatcagtttgaccataaggtaagattctcgtaaactttttattaacccttaacagattttctttaaaaagcagatcagtgctctaagataaaccttttgtacttttattccaatgttcaattcatggaaaaaactgagtaatacccctttaactttagccaacatgttcatacacagaatttctttcacaagatcaatttttcacaaacctttcataacttgcttaaaccttcagctttattctatcttaaaacttaaaacaatccttcaaccctttaatctaggcaaaaacaatccacattcccatgccttcttataatcttttaccaaaaacacatttcacttttttacacaccttgcatgtaaaactttttttcctgaagattacataagtcacatgaactaaaaggcattatagtttttgtttttctgagaaaatatttgatataagctcttattatttttaaaccaattaattaaagctcttttatataaacattacacacaacacatgtaaatacacagacagacagaagaagatccagtagttgtaagattgttcatttgccagtttgttaattggattactggcagggtggagcctttggaggaacagggccaggaaagcatgcagtttctacagcctaacaagcaggcacagctggaaggcaaaaacagatccccaaaaattaagggcctcatttttacaccaggtcctggatccccaaaagaaatgctatagaacaagacagtacaataattttaccatgcatttaattgctaggcaacccaaagtcaatcagcccattctgtgattaacccatcccccataggagtcttatgtctgggtggggggaaagggcatttccatactttttaggtggtcaagagcatgcttttctgttccaagaaaaagcaaagcgccatatattcccaaaccactgccattagttatttaccaaagtatatttcctatctagttattacacaccagagttctctcataatgcaaagtaatttctgatattcccccaaatcaaaaccatcacataacacaatgcgaaacagaacagagtcttcgattttgagaggaatctatccacttttaattcctagggtttcatgaggaaaacaggtttttcccaaaacgtggtctgtagcacttcctgtttttcccaaggagttccatgatgctagagcttgaaaaagctgacttttaaccatagtgctcttaaaaaatcctttaaaatttcttattacccaactttagccaggccaaactgccaatatttctggcttttgaactttaccaaaggaaaaccttccaaatgctccgagaaaggaaaattcaagatggttggtggaggggaaaagaatcaacaaatgatgaaggtcacacagatataaaccagaaagcactgattccctaagccaggattgaacccaggacaccattggagaatggcacagccttacctactgagctacagcactgagcagtttctgctgcttttcccagaaggagcctagagcagccaattttgagcttgcacaggcttttaagtgctcaagatagtttttagagttaactgtgatatgaacccctaaattcatgttccctggaaggtagagccaggagaaagtactgccacatcgttacaaggttaagctcccaaggacatctttcaacatgtggtctctgggcaagatgaaggagcagacagttgtcctgagtaacagaaaagagagaaaagagaaaggagagaaagggagaaaagcattgcctgtggcagggtagggaaggcaaagaactcagggaggccagagaaagactcacccattgcagccacactgaatcaaaagtttaggccgccccttcttggttgcgaaggaatcttttccagcagtcccatcagctctcaagtttccccctttggggagaagaaaagttccccatgtcctattgtcccatgatcctgtacatgcctaatcctgtcacccacagccatcagcaaagagtgcaaggcagattaatccaaagagaatagcacttaacatcctgtagtgccaaacctgttcttagcacatagagagggactttactgagaggggcctccatcctcttaagtcttaggaaggattctaatctgcctaagatgggccttgaacccaagttcggtcaagcgtccttgcctttaattaagaacgacctttactcatgtatgattatttttattgtggtagaaagagcttggagctagtagttcagcaaagtgaatataaaccctgaattggcacggagtgatggggcacttactctattatttaaattcattgcaatcattacagatgccctccagagctatcaccaaagcctcccttttctctattcaaaagaacatttagaacacacacgcatgcacacacacacacacacacacacacacacacatacacgatccctctgtcctcttttatgtcatcactaactcagttcaaagagcacttcctcagaagcattcactcactcactccccagattttgtcaaggttcccttttatcaactcccatttgaaatctttactttccctacatgcactttaaaagagatggtatttcaataattatcctttcaatgtccatttcatgtcctgcactacaatagaaatgtcttgccatacactctgcatctagcacagagccctgcgcagaggagatgctccatatttattgacttcaacatcaatagccaaattgaggcactgagtggaagtaaaccaaattcaattaaataagatgggtcaggaaagacccatacttgggaataaatctaataaaagtgtacaagatcttaacactgacagttacaaaacattgctgcaataaattcaagaattttgaaataaacagagctattccatgctcatggattggatttcttaatatctttaataagtgattctccttaaatgaggtatagatttggtgcaatcaaaatcaaagtctgtaggcaggcatagtggcacgtgcctgtaatcccagctacttgggaggctgagacaggagaatcgcttgaacccgggaggcggaagttgcagtgagccaagatagcaccactgtactccagcctgggtgacagaacgagactccacctgaaaaaaaaaaaaaaattccaacagcttttttcttcctggaagtttacatgctgattcttgttacaggacctagaaaagccaaaatatttattcttaattttaatatttgtgggtacatagtaggtgtatatatttatggggtacatgagatgttttaatacaagcatgcaatgcataataatcatgtaagtggggtttccatctcctcaagcatttatcctttgtgttacaaataatccaattacactcttggttatttaaaaatgtagaattaaattattattgactatagtcactctgctatgctatcaaatactagatcttattcatttattatatttttgtacccattaaccatccctcctaccctcaatacactttcccattaaccacgccccctacccataccctttccagcctccagtaaccatccttctaatctctatctccatgagttcaattgttttgatttttagatcccacaaataagtgagaacaggtgatgtttgtctttctgtgtctggcttatttcacttggtatgaccgccagttctatccatgttgttgcaaatggcaggatctcattcctttttatgactaaatagtactccattttgtgtaagtaccccatagatacttaggttgtttccaaattttggctattatgaacagtgctacaacaaatatggaagtgcaggtatctcttcaatatattaacttcctttcttttgggtatatatccagcagtaggatcatatggtagctctatttttagttttttgaggaatcttcaaaccgttttccacagaggttgcattaatttacattcctaccaacagtgtatgagggttcccttttctccacatccctgccagcacttgttattgcctgtcttaaggatataaaccattttaactggggtgagatgatatctcattgcagttttgattagcatttctctgaagatcaatgatattgaacaccttttcatatgcctgtttgccatttgtatgtcttcttttgatatatgtctattcagatctttcaccgattcttttgatcagattattatatttttttcctatagagttgtttgagctccttaggtattgtggttactaatttttcttttcttttctttttttactaatttttcatcatatgggtttgcaaatatttttcttattctgtgtgttgtctcttcacttcattgattgtttcctttgctgtgcagaagcttttcttttcttttcttttcttttcttttttgagagggagtctcgctctgtcgcccaggctggagtgcagcggcgtgatctcactcactgcaacctctgcgtcctgtgttcaagtgattctcccaagtagctggaaatacaggtgcatggcaccatgcccagctaatttttgtatttttagtagagacggggtttcaacgtgttggccaggctggtctcaatctcttgaccttgtgatctgcctgccttggcctcccaaagtgctaggattacaggcctgagccaccgcgcctggctggcatttatttattgggtgctgctacagatccctctgcagatattaagcaaatgtgctgaaagcctttccaagaaagaatgagtcagattccaatccgggccttagccccaggatattgtccacagaaatgtggagcacaatgattacgcctctttctcacttaggggattttctgtagaatctgtttctctccagttcttgccctatattgatatatttctcagggctgctctctagagggtaaaatgtgatgtgtcagaagatccatggaagcagccaggaaccagttgctaggagtttggaaaaaaatcctgggagcaggcagagggtatgtgggtttgaatgtcaaaacggccatgaagcaaagtaagtgagaaccaaagaatcccatcaaagtagcccctgagagacccttaaggctgaaagtggaacttagctcagcatggccctctcagccaggtgattttttctcttgatttctggtgaagcgtgagcttgtaaagccacagggagccagcacctaccatcttcttgaaagcctgatgccaaagatctttaaacatcttgacaccatatatcaaggaatccagctgccagataaaatacaagacttctagttaagtttgaatttcagatgagcaacaaagaaatatttagtgtaagtatgtcccaagtgttacccaaaacatactaaaatgtttaaattatctgaatgtcaaatttaagtgggcattcttatgtttttatttgctaaactggcaaccataactaggaacacccaactcccagcatccatgaaagctctctctactttcctgcagactcaaagccaaagaagtaccaatacttcttcagggaccagtgtattaagccacttttgcattgctataaggaaatacccaaggctaggtaatttacagagaaaagacgcttatttggctcatgcttcttcaggctatataggaagcatggtgctggcatctggttggcttctggtgaggcctcagtgacctgttactcatggcagaatgtgaagcaggagcaagcatgtcacatggctagagtgggaatgagactgagaggaagtgtcacacatttttaaatgaccagatcttgcaagaacccactattgtgaggacagcaccaagctatgagggatcttccccatgacccaaacacctcctgccaggccccacctccaatactggtgattatatttcaacatgagatttggagaggacattcaacctatatcaaccatttaaatttaaagttgaggaatgaaaacatttaagagcaagtaagcatgaattatgttcacccaatcgtactcctaaaaccatctcagctcctctccttcagccaagggcatgtcctcatgtccaatctggttctcactggagagatttgggagtgggaactctgcaatcttgctgtggtcaataaaagaacctcccagaggctcacaggggcttcaagcttcaatcgtagtccccatttcagatcctctgacactctcccatccactctccttgtgcctgcttcaaagccacagcaaacagaagccaaacctttagtaaggatgatcccaatctcaattccaaccccagccccagcatatccacctttgcctatacctaacactactatctggacatccgctttcagcccaggccctcgctgttttcctcattgcctctgtggcacctcagtcccagtttgccctccacccatccaggaagctcactcccttccctggattctcatcttggctcttttatgagcttccttgcatgccttcaccttcctgggttccagagagcccaagaccagctcccaggaatagtgcccctaccccgatgagcctgatcccagaagaattagccccaaagtaatgctgagctttagccagaacaaaagctagcctagaaaattccccaggcaggaaacagatgactgcacataagtctcattgccgaccccattcgtttcccacaggggcttgtctgcatcctcatccacgtgtgctcaggctcagagtgagtttcaggtgaggaaagagtgatgaacaagcagaatggaggaggaatttgtggggttgcaggatggggctctgacagggccccaggttggcagccaggtttgtttctctctgggacccacatctgatctatccctcaggaaagagtcagtcagccagcccccaggtgtggaaaccagatctgtgacatcatggagaactgctccatggataagcccatgagtaagccctagtgccatttacccaggtgtggattcacctgctcctatgctccacttccagcaatgatgacaaacattctttggtcccttggatcaaaagactttgagtcaaaaggtttcaggtgtgaactctgactgcaccttcccccataatcaaagaaggatccaggtaggaatccctgccatgctccaggctgaagcggggagagagcagcagaaaaggaatttcaataactgggtcctcccaagaggggaccctgctctgttctccatctctccaccttttgtcacagatgctcttcaaccaattccgccaccatgtgtcaccatgtgtctctgaacacaaatcttaaacaatctctttatctctccagatgaagaaagacccaccagggcagacagagctgatgtttccttgcagtggcttagacagtaatctgaggtcctgggatacagggtacattaagatattaaagacctcgagctctgagtgtcgaatctcatcatgatggaatccaacataaaacaagactgaatgcaaacatgatgcttaattgtgtgcggaattgaaaaaaatagttctcaatttttttgcttgcaaattgtgggatacgtttaccagatttgaacttttcccttatttgtcatcccgctttgttgattctgtaaccaggggcttgggattcattttggggatcccaaagcccttgtttgttgaagggtttcaaagtctggtaggagggtggtgcacacacagatagaattgttcatctgtgggcggcctctgactccctccctgggtaggcctccaggcccaatccttccttctgaggaaccgccgggaaagactttgatcaaaacaattaaatgcattgggagctcagtctgaggcaattatgtggtttcatagaggaagaggtagagatgactcaggcatttctggccccatgtcagcctcagggcaatcacattcgggattttgcaaaagacacattcactctgagcactggagacctacatctctttgtccagttgacttaagttctcaccaagtgaatatcttcatgctaaagacagtttcatttgtgattagggacaggagagcatgtttcccctcggtcctctgattctgactggaggggcagtgctgagttctggatcggggctgctggcagtacgtgggaaagctgtcctatcagtactgtatagaacaggtggtcagagaaaatgcctccctggaaaaccttttcacatggttgaatgtccccagacatgagagggagtggaggactttgttctagagcccacctcagaggccaggcactgccaatgccatgagcaaaatcttccacctctttcccccaattttctctccatctggattctgtgttgctgaggtcatttgctctgtctcttcctaccctctgtattcttctctctcatctgactgacttttctcactcaattttcaaatatcacctaaaataataatacagataagaaacaaatgtattctaatgaaaatgttcagtctgagaagtaaagattacatggtgagcattgataatttttatcatgcttcctaccctccccaaaggtaactgcatttaagatgtagtgtttgtatttttccataaattctgtatagttgaatacatataagtctacatatatgccacacttttcccttcttataaataagatatcatacatcccccccttgaagccctaaaagcccacagatcacagataattctcatggctgcctagatttctattttatggataaattgtaatttatttcatttgtcttctttttgaaaattatgtaggttgtttgcaatatttcagccttaccctaaaaattctgcaacaaatattcttgtatgtacatatttgggcactttaattagagtgtttagtcaacagcaatagatgtgaaaattctgaagcaaattgtgtaagatgctctgagccatatgcatagggaaaaatctaaacaatagattagactaaagcaataaacatgaatgaacaggttcagggtttcagttttaagaattgaaacatattttgaatggcagccagtaaaatgcactgactccaaacacttcaaacaagacattcctgttatcaggaaggttaggagggtaacgcttgttttgttcactaagctgggtggactcatgattactgaagcaatactcatttctgctttagtctcctatgtttgcatcccatgaagctcaaatacgaattgaagcaaatctctaagatttttttttttttgccttatctcctaaaacttgaggaatgcatgtgttcttagtgattcacatccacgggacaaaaactcaaggagaaataagagctgacgtcatgcaagtcttggctgcttttgttactatacattttctctgagagtccaacagacttcgggctggaacttggcactggagactcatgttcggaatcataggggaacatctggctgttaatcacttgcacaatttagaacatttcctttacattggctttaaattctagcccttatttcattttgtagtcttattttctttcttctgcatgctcacaataccaagcattaaatgtattttaataactaaaaaaaaaaaggaattttatttctggtggtgttactaatggttgtgtgattgtgcagagtccagaaagctgctgacttaactacccatcacccagctcaaaacgcccaatcccctcttaggtgaaaagtgatgaccatacagatatttaaaggagaagcaccctcacttacaacatcagagggtcaaatctacaggctcatcagctgtcctacattttgtcaaaataaagctcctctcaaacatggaggcacatcggcagttcatggagccagaagtacctacttcaccctctctcttacatgggtgggcctgaagtactccttatcagggcatctggactctattttgggtgtgtgcaaagtgttttgaagggtttttcttggtcgatgttttgtatttgggggaaaaattaatcatcctcaaattgaatcgcctaatcaccaggtgaccccaggtgatggcatggcaccatactctccagaggtctgcgatatttgcccagtggagtacagctcccaacaagcctgcggtcctccattcatgatgctctctagaatcccaagatggcgtttgtttgcctgcatgggattcaccttccatgactctcaggaatcaggaactcaaaagacatgatcctgtttttttttttttctttttttctctgcctatgtgtatcagctcagccaacctcctcaatgtgctttccctcacgccagcggcacaccagcaagtcagcaaagttcaggggctcagtatgcactgaatgaggacacaagtcttatttgcctctcccttgactatgttgggggtaaggagaagacacagcctctctgcaagcacaatactcttccctgaaaggccaccctctttctggtttccagtactcctcttatatcactagtatcactagttggttctgcttctctcccatccagggatctggagaagtttcatatcaaataaacataaacacacgaataaatgggtgtggtcctggaaccaaataaataatcttcattgaagtggggatggggaggtgtaagacaaagacagtagtgacttgcattagacaggaggtagtgtgaaaccacgactcctgaaactgtaagcctggtctgctgatcatggacaccagcagaatgaattcataagttcaagtggtggaataatatttttacagaggtaaaagaaaataacagccaacaaagacctttctaaaatagccttcaaaaatggtaaggaggttgggcacggtggctcacgcccgtaatcccaacactttgagaggccaagacaggtggatcacatgagtccaggagtttgagaccagcaactcctgggcaacatggtgaaactccatctctacaaaataaaaaattagccaggcatggtggcacatgcctgtagtcccagctactcgggagtctgaggtgggaggatggcttgaacttggaaggcagaggttgcagtgagctgagatgacaccactgcattctagcctgggctacagagtgagaccctgtctcaaaacagaaaaaaatgaagctgaggattctccaacttacagccattaagggcagtgacttcaacgagactacttttcctgctattgacaacagtaaaactggatgaaccaaatgaggccactgttttcaggtggtgaacgaagacaggataaaatatcaatctctgaaagtaaagtcacagagtgaacacctggatatttggactctgcctggggacagtttcccaacggaagtgcaagtagcaaggatctgagtatagcacagcagttccgcagaactaaggttctggatggcttgatggaactggaatcccttaggtgtggcatcagtgaagaagtgcgagccccccaaatccacgtggggtccaccaaagttcctggatgaagactggtctgcacatgcacattctagaccacccaaagcttagcagagaggtaagtcttaagaagtatttgtctcatttatacccatgggattttaatcaatggaggtaatgacagggagatgccaatgccattgaaatatgtttaatgtcactcacagtttcggtagaaattagaggcacagaatgtgaagcaggggcatgtggggaagccccaggtgtgatcaggagacagaggcaggagtgagcaaaaacctaggccagagcccttatgatgtgttctgtgggaaaggcagaacagggcaggagatgcagctcacaactggtcagtttgaataatattggcagggtgtgaaatatagtggcagcctctagttgtctggtacctggccctgggttgacttagggcagagaaaatgttggcttggtgtgtaagagagataaaggagatggttcagagcgggggctctggatctcgggggagatgcagatacctttggccatgagttaaaccccgtagttaatggataccaaatagagaaatacagactcaagaaaacacaaagcactatcccagttgggagagcacaaaggagacattatcaaaagtaatgtgggattctggattggatcctggagcaggaagtggacaggaggggactaccaacaaaactaaaataaagcctgtagattcaacattcatttcctactttcaataattgtattaggatcatttaagatgttaacattagacgaagttgggtgaaagatcaaaactctgtactggctttacaacattcttgtaaatctaaaattatttcaaaatggcaggttaaaaagtattttaaatgatacctacaaaatactatcatgatagtgatagtgaacactcactaaagatatgatcaggatgccctaataggcctccttattcttgtaattgcaattagagttccttctttccttaatattatgtaactggagctcccttgagctatttctagcctggggtataatgtctgactcatacacatgtagtttcataggaagccttggggccctagcagaataacactatcacccacaagataaccagccaggtgctgcaccaggtctaggccctctgtgtgatggatgcggtcccgtaaccaaagggagacaaagttaccacaccctatgtggcccagaaaaatggccagagactgaactggcacagtctctgctaacacaagagtaacagcactcttccacccagtccatgctgcctggaacttccctgacagagaatcattctgggatcattctcgagaacttggcaaatatctcaacactctgacatcacattctcttctacagtcaggatcctcaatcctggattatagactcacaatctcaacttcttttctggacactggaagtctttaaagatagaatggtcagaatgactgaaagtatttttttgtaatgagaagccaaattattgtaacacataaaatgattttgctgaaaaacttgattgatggcacataattacaaggcatattctttcctttcttagtagcttaaaaaatcaacatttctttccttctctaatacattacttgggaatgtctcagtggggaaggctcatttctccttcgcacagtgttagctacgatggcctgactgagcctggaggatttgcttccagaatggctcatttatgtgcttgagaaactggtgctgggtgtcatttgggagctcagttcagggaattggctaggggggtcttagttcctcttcatattagtgcctccacagggctacttgggcttcctcccaagaaatctgtattagtcagggttgtctagagggacagaacgagcaggagatatatatatacatatatatatatacacacacacatatatatatcttattattgtgggaccttgtgatcgtgtgagttaacactacttaataaactcccatatatgtatatgtatacttattataattaatgtatgtatatctacatatgtatatatgtgtatgtatatatacacatatgggagtttattaaatagtattaactcacaggatcacaaggtcccacaataggctgtttgcaagctgaggagcaaggaagccagtccgagtcccaaagctgaagaacttggagtctgatatttgagaacttggagtccgatgtttgagggcaggaagcatccagcatgagggaaagatgtaggctgggaggctgagacagtctagtcttttcacatttttctgtctgctttctattctagccaagctggcagctgattagatggtgcccacccagattaacatcgggtctgcctttcccaacccactgacccaaatgttaatcttctttggcaataccttcacaggcacacctagcatcaatactttgcatccttcaatccaatcgagttgacagtcagtattaaccattacagaagccaagctccgcatgcaagtattccaagaagctgatgaaaatcatgtccctgacatggaaatcaagacactttcaccacattctactggtcaaggaagtcacaaggtaagcccagattgaagaggaagggattcaattccacctttcaatgggaagaacagaaagaatttgtggctatcttaaacctaccacttagagttttcaatagtttaaagaataatttatttttagaacagcattagatttacagaaaaattaagaagctagtataaaaagcttccaaataccttgaaaccagcttcccctatttttagcttcttacattagtattttattataattaatgaaaggatatttataccccgttagtaactaaagtccatagtttatctaggttttcttcattttcaccagatgttctctttctgttccagaatcctattcaggacacattgcatttagttgtcctgtctctttagcctcctcttgactgtgacagtttctcagatttttccttgtttttgatgaccttcacagttatgagcagtactggtaaggaacttgcttattttctggcacaagatgcttcagatccttaccagggtctgaagggcactggtaaggttgtagaatatccctactggaatttgtgtgatttttccctctaatgattagactgacattattggttttggggagcaagataacagaggtaaagtaccatttctatcacatcctatcaaggagatactgtcaacatgatttatcattgatgattatgacaccgattacctggctgatgtggtatttttctccagcgtaaagttactctttttctcccctttccacattgaactctttggagccaggtcattatttgcagcctgcattttaaaaagtgaggagttgggctttccttccttgatggtgctgtatttatatatattacttcgaattcttctgtattagagatttgtctcttctccccacttatttattcaatcatttatttataccagtaggaactcatgagtatttattttaaactttgggtttatcttagtccattcctgctgctataacaaaataccttagactgggtaatttataaacaacaaaaatttatctctcacagtttccggaagtttgaaagtccaaactttcaaacacctgcagagtcagtgtttggtgagggctgctctctgcttcaaagatgacatctttcactgtatcttcacatggcagaaaggggaaacaagaacagacttcctccagcacttttatatgggcactaatcccactcatgagggaggagccttcgtgacctaatcatctcctataaacctacctcttaacactgttgcattgaggattaagtttcaacgtgaatcttggagggacacaaaaattcagaccacagtagggtcataacccaataccaccgaattcatttcttgctcaaattgttccagctttggccactgggagctcttctgttggcccttgtgcccctttgacatattgtgatcaatgtggggttatatcattattgtaattgttattttcagcacttccttattttctggcacaagatgttccagattcatcgtgtatattttctgttccagatctagaatgtgccatttctccaaggactgtgcagtccttttttacacttctttccttttaaatttattccgtggttctagttcttccttgatcctaaaagtttaggtcaaattgtatacattttcccggttagttttatttagtaaatataaatatattatttagttttattataaatacattatttataataaatataaatacattatttataataaatataaataataaatatcctggtgttgtcaacttaaaatgcccagaaatatgtaaaagtgaaaacaaaactcttgatttaaagatacgtttcactctatctttcctggctgcccggcacttctacctatgcgtcttccctgttcactgacctagcttctgttcttttggtgctggaagcacaaagagggtgtgagattcctaacgttattgtgattatccatgggcttttcaaatatgtaaagcggattacctcaaaggccccctttggcttctttagagacacaaatgctgaggatctctcacctgagcatccctcgatgagggctgttgcgtcttgatttcatctgggtagttacaggcatcatccaccacgaagtttccaacccagagtcaggatgcagctgagcttgacgggcgtggtgcagacgtcggtgcagcgaaagctgaggagccgtgggcgttcacccgggtgccggtgtttctaaatcgcgggctgcgacctgcatactcaggtgccagctgggagcagaggcggatttgcgaggccaaaacctgggtgtgacttggaatctcagtcgcgctatgggggtgcacgctggctcaaatccccgtggaagatgcacctgtgacctgcccaggctgcaaaaccaggtgcgctgccatgggcacgactcactgggctccattttcaccacagggaacttggaccgcctgacattgaaaaagactgaggtagctcgggggcagccaaaagaaaccagaggcggggatcctagtatcattcaggaagtggacccagccgcaaactcaggagcgttccaagtgtccagagcgtctggtagtcgcaatagccagtgatcagtgacacccccaagaaagtgatagcgacagaaacatggcgactacttacactgccgcccccgtgcgcccctgcgcgagctctgctggaggcgcccgcgggagcgcctgcgggagcgctccactgcggaatccgccgctctcttctctgagcagtctcctactgccatctagggaggaatacggggataccggctggagtaccctctctatcttcttgcctgcaggggtcgcaggatagatgtttcgagagcctataaaagtcatacagtgctatggtgggtgcacgctaaacgtgcctttgacactgtgattaaatcacataacccatataaaaagtaattggaaaagacaacccccagaatggagagaatgtttaaaaatcgtatttctgataagagattaatatccagaatatataaataactcctgaactcaacaacgggaacaaataactcatttaagagacaagagaaggatttgaatagacatttctctaaataaaatacataaatggccaataattacatgaaaagatgcgcaacatcattgatcattagggaaatgcaaatcaaaataacatggagatagtacttcactccaactagcatggctattaacaaaaaaacagaaattaacaggtgtgggtaaagatgcggagaaattaacaggtgttgtgcattgctggtggtaatgtaaaatggttcagctgctgtggaaaacaatgggagtttctcaaaaaggtaaatatagaattaattaatatacgacccagcaatcccaatagtaggtatgtactccacacaattgaaatagggacgcaaaaagatatttgacatcaatgttcatatcagcattatttatagtagccgaaagatggaaataacccaagggtccatcgacagatgaatggataaacaaaatgaggtattttgatacaatggagctggctactaaccacctgctcctgtattacctaaaggccttcactccctaacccattggtcttttttgtccattattttttgtaggggttataacagcattcaagtgtggagtcaaggctcactttaaaatgcatcaaacatagctatgtatcaattcaccacagtccgtcaaaaggcctgtgacgcactctctctgggggtatttgagccgatatcccagtagtcaacactagatggcagtaggagactgctcagaaaatggagagcggcgcccaccttgcagtgcgcaggcgtcgtcagtagacatcgcgcaggcgtcgtcagtagacatcgcgcaggcgtcgtcagtagacatcgcgcaggcgtcgtcagtagacatcgcgcaggcgtcgtcagtagacatcgcgcaggcgtcgtcagtagacatcgcgcaggcgtcgtcagtagacatcgcgcaggcgtcgtcagtagacatcgcgcaggcgtcgtcagtagacatcgcgcaggcgtcgtcagtagacatcgcgcaggcgtcgtcagtagacatcgcgcaggcgtcgtcagtagacatcgcgcaggcgtcgtcagtagacatcgcgcaggcgtcgtcagtagacatcgcgcaggcgatgggtgaggcggctttggccgccatgttttcgtcgcagtaactgccttggtgtcagtagtcattgccagtttcgggcgttctggacaattgggatgctgcagagttcatggctggggctgctcgttgggtgggacaagaatcctctgcaatggtttgttttggctgcccaggaggtgcgtcaagtcgctgccgctcccctcgtgggcgtcaggcctcaagagttccccgcctagaaaatggagctcagcgagtcgtgcgtaccatggtgcacctggttttgcagcctaagcgggtcactttagtgcatcctcctcgcggattggagcctgtttgcacccctatagcccgaatgagacccaagtcacacgggctcagaagttctttgcccctggccatgatcccccagccagccacccgagtttccaggcctcaggcgctttggaaacgcctgtacgtcgcctgtacctgaatggcaggtactcatctgctttagctacatcatagtctgcaccacttctgccagctcgattgcagcctggatttgagtcagaaacttttcatggtggatgagggttgtaaatatccaaagcgactccagatgaaattgccctcatcaaaggaagctcagatgacagatttctgcatagaagccaaaaaagccttccctcaaggaaagagtcagtttcaagtatttgcaaactcagaacagtgtcaattttagatcactacaatgctgcccatcaaggaagaaccctattgctccctggcgtctctccttgagccctaaacacagtagattcagaaactaagtcagcaaatggaggaagattcttaaccgtgataagttggaaaacgtgcgtcagagggccacatcccttcctcgagttcaggctaccacctgactgcaggtcagagctggaagagacagtgaaaatgtaagtttaaataaagattgtcgttttcacttttacatacttaaagccattttaaatgagtcacgggcagatatttattaaataaaatgaccaaaaaattaatgggatttgacctaacttttatcctggggcaggggaagaactagcactgcagaatacatttaagctgcgagccgtggctcctgcctgtaattccagcactttgggaggccaagatgggagaatcacttgaggccaggagtttgagaccattctcatcaacatagcgagtcaacttagggagatcccatctctatttattttttaaaataaaaaaaagaataaatttaaaaggaaagaggtgtgaaaacgacagctacttagtaattaaattctgtgagtcatggcttgttcatgggaatgattctatttgaatgttataataattttgtttctaatttcagaaagtattttggtccttctgaccaagtctttgtatctgtgtaaatcatgagttaaagaaataactttccaaaaagaggttgagatcttctgattcaggacttaagcattgtgagtgtcaagggggtgtggtgtcagtgttgagatgtgtggccctgtccctgttggtggtcttggtttcagacttctgtcaggaaagagtcagacagtgttgactaggaaaaggagttctgtggtgtctgtggtttggtctgtggtaattttgctgagccagaaagggaattccagccttgatgtccagggctgactctccgggcaggctgcccattggtgagtgggagcagtgcctgctgtgctttcaggactgtgtccatcacttcctgtccaggtggacactgtagcgcaggcttcccattgatggacgggaacctgatctccctgtgcttttactgccatgctcatcacgcactggggatcatcagcccaccttttaaacccagcccacaattggccagttatcttgtgggtgatagtgcaactgtctgtgtcgccaggcttcccacacaactatctgcatctggtttggactggctaaaccaggccacaccaaaggtcaggggagccttagatacataacgcttatttcaggtgtgagggagcatgtgaaggcaccctgattgcatctttaggaagtgttcattatcgtgattgcgtttttatatgtaacatttaaaatattgtctaacttattactttaaaataattttagacttacaaagaagttgcaaaaacagtatggtgaatttgtctttttcactcagcttcctctaatgttgcatagccttaataaaattattgaaaccagaaaactaatactgacataatactattaactgatctgcagaccttatttgagtttcatcagttgtcccactcgtgtccgctttctggtctaggatgcaatccagaattcagtgttgcaattcgttattgtgtttccttactctcctctattctaggatagttcttccttaagccttacctgtctgataagccttgtcttatcagacagatagtcttgtctgtgtatatgcagcctagccctcagccaggaatttggggaagactccacaaggacatgtggtgcttacctctgcacagttcttctttgataccatacctcagagactccaggctcaccagctgccctgaatgccctcagtgctgcagaactgctgtcctgtgctcagatcccagctatctgcattgcacttgggaaattgttctttgacaacttgtttatctaagggctcaccctgtaaatgtccatcccttgtggaattgcagtcttgtgctacctgttgtctggtacctaaacacagtggcttcatatactttattctgtgtgcagttttatagttgttaatgtcaagagagctagtctagtttcagttaacaccatcatggctagaaatgggagaatcctcactttcattttgaaggctattttagcagagtatacacttctacattggctgtttcattctttcactctttaatgaggaaattccttgttagtactattcatgtccttggttagcaggccagtcatgctttcaggagtctagttttcacaccatcttctcttcagttcaaattactgttactttccttttctgtttccccatacctgggtccatgaagatgtatttactattactactatcattattaagacagttaaactctcctgggttcctaggtgggagagaagtttaactgtctacaagtataaggggagaactggaaggcaaaagagggtagccttttggggcaaggtgtttctctttagagagactgtaattctcttgatccccacagggtggaggtaaacttggctggtttcctagttcagtgcatactaaacctctgaacttgcttgtgtgccactgaagagagggaagacacattgaggagaaatgcggagctgatacagacaggcatattgtacacaaccaagataagtgggatcaagccgccctgtaagagagagggtagaagcagggacttctggctccctgaactgttaactgtgtctccatttttttttttttttgaagacactccactctgtcacgcagctggagcgcagtggtgcagtcatggctcactgcagccttgatcttctgggctgaagtcgtgtcttcatttttgataggaacgttattttgacaaaatgtgggacagctgatgagcctatagatgtaactctctgatgtagtcagttagtcatatgggtagctctccttgacaaactgcataggaatctcttttgtcctcttagtaggtggtaattttcccctgggtgtgggatggctaagaaggacttgcacaattacataaccatgggtgacatctccagaaagaaaacctccgataaacatgacattttctcttttggggcatttggattcagtgcattttattggcaactgtcctatgtgtttaaattcctagaactgaaaccctggacgcacggtagctcataattcttgttacataagataatttgtttattgttttagttttcaattagtttttccttaacatataactgagtgcatcataaacaatttgctttagaatttctacttccagggctgttactgactggatgcagtgcacaaagacatacgtataagactatttttttgtgatattttagagcaatggtgaaaagttgggaacaacttaaatcgttttcaacagaagactaatgaaataaattactgaaacttattcacaaaatggaaatctaggcagctgtaagaaatggatatgtgctcttagggatttaaaggggtgtgtataacattatcccataaagactaaagtgtggtacgtgtgtacatttatattaatatgtatgcaaatgtgtagaatatagaaaaattcagacactatgttgtaaacacagttactttggggaggagaggaggtgcgatgagagaataccaaccatggctgtataatctctatttctgaacatacacaacatttttcaagaaaatatattactttattatttgaattattattttcagccatatgtatagactgaaaggagagagagacaaggagacagaaagagacagtgacagagaggacagaagagtcacaaagagtgggaggagagaaagggaaggaccttagccacagaaagttgagaggagagtaagttggaagaggtagtgattagagattttgcgcattgacagtggttgacttggcttctggggtaggccctggaacaaagtcctctgatcctcggttgtttgggaatagtcaattatgtaagggtattctggtgctaccagttttgtgcaatggtgggcatttactgctataaacttccctcttagacctgcttttgctttttcctacagattttggtatgttgtgtttccattttgtttgtctcaagaaatttttaaatttcccttttaatttcttcactgacccaatgattggtcaggaacatgttgtttaattcccatgtctttgtactgtttctgaagttcctcctgttacggatttctagtattataccattgagttagaaaagatacttgatatgatttcagtcttcttaaatttgttaagacttgttttgtggcatacatatgatatatcctggagaatgctcatgtgcagttgagaagaatgtgtattctgcagctgttggatgaactgttttgtataaatctattaagttcatttggtctagagtatagtttgaatctgatgtttctttattgattttgttttgtctggttgatctgtccattgctgaaagtggggtgttgaagtcccctactattactgcattgctctctctctttactattactgcatctgtctctctcttcagatatattaatatgttaggccattcctacattgccataaagaaatagctgagactggataatttatataaaaaaagagctttcattgactcacaattatgcaagctgtacaggaagcatggtgccaacatctgcttctgaggaggcctcaggaagcttacaatcatggcagaaggcacagtgggagcagaagctagagagagagtgtgtgtgggaggtgtcacacacttttaaaaaaccagatcttacaagaacttatcaccaagggatggcactaagccattcatgagggatatgtccccatgatacaagcacttcccactggtgccccctccaacactgggtattacatttcaacatgagatttggtgggaatacaaagatccagaccatatcattccacccctgtctccacatctcgtgtccttttcacgttgcaaaatacaaccatgccttcccaacagtcctgaaaagtctttactcattccggcatcaactcagtcaaaagtctcaagtctcatctggacatgaattccttccacctatgagcccgtaaaatcaaaacaagttatttactgccaacataccatgggagtacagctattgggtcgctctccaaaagggagaagttgaccaaaagaaaggggctacaggccccaatgcaagtttgaaacccagcagggcagtcattaaaacttaaagctcctgcagtgagccgagattgcgccactgcactccagcctgggcaacagagtgagactccagctcaaaaaaaaaggaaaacaaaaaacaccaaaagaaaacaaaacaaaacaaaaaaacttaaagctccaaaatagtctctcttgactccagactgtagtgttgggtgcatgtgtatttcatatagttaagtcttcttgttgaatctgaccctctatcattatgtaatgcccttctttttcctttttgatcattattggtttaaagtctgttttgtctagaataagaatagcaacccctgctcttttttgttctctgtttgcttgatagatctttctccatccctttactttgagccatttaatttgagatgggtctcttgaatacagtatacagttgggtcttgcttctttatctaacatgctcctctgtcttttaagtggggcatttagcctgtttacattcaagtttaatattgatatgtgagggtttgatcctgtcatcatgttgttagctggttgttatgtagacctgattgtatagttgctttatagtgacagtgggccatatacttaagtgtgtttttgtggtggctggtaatggcgttttgtttccatgtttaacactcccttaaggaactcttgtaaggcaggtctggcagtaatgaagtcccttagcatttgcttgtatgaaaaggattttcttttctcctttgcatttttgttctttgcaacaacaaagaaaccatacaggaacattggttgccttctgggacaccaacaattcaaatattttattgctttaatagtgcttcatatttcatgtaggctccactcattcttttaaattattttttctttgtttttgtctgactaggttacttcaaaagacccatctttaagttctgggattctttcttctgcttgatatggtctatttttgaagcctttgagtgtattttctatttcattcaatggattcttcagttctagaatttatctttggttctctttaatgatacctatctctttggtgataaatttctcattcatagcccgaattgtttttctaatattgttggtttttttgtattgtatgtcattgagaacaactcacttctttaataacaacatattgaattttttctgggatttcataaattccttttttttcttgttttttggagatggagtctcgctctgtctcccaggttggagtgcagtggtattccactgtccactccaatctccttctcctgtgttcaagaaattcttgtatgtcagcctcctgagtacctggaattacaggtgcgcaccaccatgcctggctaatttttgtatttttagtagagacagggttccaccatgttggccaggctcatctcaagctcctgacctcaagtgatctgcctacttcggcctcccaaagtgctgggattacaggcattcgccaccacacctgacctcataaattcctttttgattgggatctgttgctagtgaattattgtgttcctttggatatttccttactttttcatgtttcttgtgttcttacgttgatatctgcacatctggtgtaagagtggcttcttccaattttttgaatttgctctcatggggaggatttttttcctgaagttgtatctatgatgttggttgggtagggaattttggctttgattgtgggtacatgcagtagtgtagtctctgtgtgatttattttggctataaacagcatcagtggtgtctttcattttctcagtggcttagggtgcaattgttagtgaaggctattatgaagttttgctggagactgggatgccaggtaggccaggttttgggccacggtggcagtagtgggctgaatgtgcctgtctttgggccccagggtggcatacactggcatcagtgttagcaggtccaggcaggccaatcgttggtcctccaggtcgcttgatcaggtattgagaatagcagtggtatttggatgggtggacaggttcttgggccctgggcataagtagcatgggcaatggcagtagcagtgatgggacaatcctctgagacccaagcagtctgtgctgatgttggtggtagctggggtgcactaggcaggccattcctcaggctcacaggtggcacctgcaggtgggtgctggctgtggtggtagtggcaggctggttgggcctaacctcagatgttaagagaagtgttcaggtgctatcagtagtagaccaggttgcgtgatctgcaggcccctttgatgggtgctcaggtactggggaggtggagctgtgccaggcagacctgttctcaggcccccagatgatgtatgtaggcactggctctggtaatcagggatagggtgatcctcaggctgccagtggaatgctcagttgagggcagcaggagctgcactgcggccatgctactgggaacagtgagactgcttttagtgggagcagcgttaggcaggtggctggggcatgtgtgctttgcctgtgcctcaaccctgcagtagcctgcaagtggcagcaggcagtggaatttgtccttggggcatgagaaaatgcatgactgcccctctactgatgggaaagggttgctgtcatcagtttccactttggtcctggcagtgggtggggaatgtcagttgggctccagggatatcgggatgtgagggctgtttggcccagggaaggatgcagtctagtggaggtggagctcatacaatggtgccttgatgcagctgattaggacttaggagtttgtgggactccatctcattggagcaatgccatagtgcagtctccagacagctccctatgttagtctcaggacctgtgagggctgaggggctctcctgtggctaggactgtaggaatctgtggtagaaatgtggaccactgggggtctctcaccattcgcccagttgattctggctcggcaggccacttcacttttctctccttccttgcttttggtgcctcccattacttctctgttgaattctaatgtcctctttcagatgatctatttgaagtgtcattatctatggactattttgtttcctctccataaaagaggcaagtacccagtgcatctagtcagctgtgttaaagtctttcctttattctgtgtcttttgattggataatttgatccatttacattgtttattatttaagataagggctttttttctgtactaactaatgaacccatatgtttaattgtcagactttattcagcaccactgagtctcaatatcaaaacaactaaaatttaagacacaaccttcaattgtaacatatatatttacacttcgtgttcattatattgttgaatggtgccatcattcatctacttggctaactgctaaccagaaattaaaactcttccattcagcttcttgtcattgatttacaaagatttattgaacactttctatatattaagagcttaattgtgcactagaaatataaaaataacaagataatatctgttctggagttgaggcatttgggtgacaataaatgaagttacaaaacaatgtgagaagaggcgatgagaatacaaagataaagacatatctagagctcttctggagtgatcatgtcatttgagacctcacagatgaagtaatatcatagcctactgttgtatgttgattggggtttgagaagattgaaaaacaaaacaaaacaaggatgtcccagacagaggaaataatcagcaaagctataaaggattgaaataggaaaaggaagtcattctatgaacatgactgggttaaaggcgctaatgtagactctggtagatcttaaaagttatttataggtaaggactttctactgctattttgtttattgttttatagatcctttgtttctttcttcctgtcttactgttcctttgtggttaagtgattctctctagcagtatattttgattccttactttttatttttgtgtttttatctactataggtttttggtttgtagttaccaaaaaaaactttatagttacaagaaaaccttatagttatcatatgttattttaagctgataacaactttgataacaaaaaagcccacctctacacttttactgctctgcaccttgtattttgaattttgatgtaatcatttacatctttttatgtcgcatatctcttaacaaattattgtgattatttttaatagtttttaaaccttcatgtgaaatacatgtgatttatacaccactgttacagtataattctaaatttgactgtatacttacttttaccagtgaattttgtactttcagatgtttttgtgttactcattagcatttttttctttcagcttgaaaaactccctttagcattttttgtaagatggctctggtggaggtaaactcccccagcacttgtttgtctgagcaagtcttatctctccttcatttctgaagaagatccttttagggtatagtattcttggtggtaggtttttttttttcccttctgcactttgaactctctcaggtctgtaaagtttccgagaagtctgctggtgagcatattgaaactcccttatatgttatttgcttcttttttcttgttgctttcaggatcctatctttgtctttgatttttggcagtttacttataatatggcttggggtaatcttatttggattgaatctggctagagtcctttgaccttcttgtacctggatatttacatctttctccaggtttggaaaactttctgctattatttgtttaaataagctttctacctcttggtctccctctttaattccagtgacccaaacatttgctcttctgatgctgtctcataaatcccataagctttcttcatttctttttattatttttttcttttttcccctctgatggtacattttcaaataacttgtcttcaagttcacagattcttttttctacttgattagttctgctgtttagactctgtattgcatgtaaaattttgttcattgtatttttcagctctgggatttctgtttgagttttttaaaattatttcagtctttgctaaatttcttattctagccacttactgttttcctcatttctttgaattgtttctctgtattttctttaagtttgctgagcttcctttaaaaagttattttgaattgtttagtaaggagttcatatttatccatctctttattgttagtcactggtgctttattttgtctccccgctaatgtcatatttctctgattgttcttgatcttgtggccacacgtcaacatctgcatattttaagaagtaggtacttatttccagtctttgtaaactggctttgtctgggaacgcccttcaacaataagcctgtctagatagcctggacagactggtgtgatctctgtgccactgtggccattacaactctagagggtgacctatgctggtacgtgatgacaagcacgttgcccggctggaatctcatggcttctgaggctggcacagagctggcatatgcctgaagcctgtggctgctggtgcctgcctactgccaagatttgtctgtagcccagggcccaggctagcagtgatgcaaactgtggattgagctggccttgcaggggctgtgggttcccatctggttcccgggcagctctggaagcttagtccataggtactgatatgggttgagcggttgcaggggtctgcctaatgcagggttttactgtggaagatccagtattagggtccaaggcaaaattttgtttactttcctctctttccaccaagcagacagtatgtatctctctctgtgctatgctgcctggggttgagtgaagggtaatttgggtgacataaaattgttcttcctactctcttcaatgcatcttttcttattatgctataactaggtactgtgatctctcacctggtttccttagctcttttgaaggtatttttgtgcatgaatcattcaaattgatgtttccgtgtgggcaatgattactagagagtcctaatgcaccatcttgctctgcccttcttcccaaatgcctgtagcctcatagaaaaacatttgtaagaagtagatatctagggaaggattccactgagaagtggtccacatttatgtttttaaacagcacgttttagtgtgaggaggccattaagtggggatatttatgaaagaatataggcaaactgttacttagaatgtcttcagttctgtaaggtgcttggcatgtaaggtgcttggcctacatatttctttcaaattagtacacagtcaaaaactttaatcagtatacaaattattctgttagaagagacacttgtgttttccatgtttgtgtttctccttaggagttgtatttctgttgctgagataacctattgttatatcctagtttatttataatatgttttgtaagaaagactgatgtcattcattgtaggtgtaaaacaggcttaccatgaaatgaaagcctttgttcaacttagagtcctaatgtttctgatttcttactcttgttgctgatatacagaagcagctacaagagctgaaagatgactgtgcacttaatgtctttagttgaaagaattatttagctaaagaaacacagtcattagctatggaatttgagagcctcaacagtttcaatgacaaatacaaaagcatttttaaaaaatgaactcaaacagcatgataaatttttatataaaaataaagtttcaatttattttttaatgcctttctgaattactggttaaactaaaatctataaaaatgcaatgcattaagtgtatataccataatcaaaagtttgaagtgtcacatttcttctataatggggagaaattaatcacatttggtaaacattttttacgttcaaacctggatttcaagataagttaaataattactttcattcactgtcaaggctctttcttgattcacattttgaggttgtttcttttcttaatgcaatactaactttgtgttgttgtttgttagagattggggtcttgttctgtcacctaggctggcctgcagtggtgtggtgatggctcactgcaccctcaaactcctgggctcaagcgattcttctgcctcagtcccctgagtatctgggactacaggcacacagcaccactcctggctaattaaaaaaaattttttttttttggccagccacagtggctcacacctgtaatcccagcacgttgggaggctgagacaggtggatcacttgaggttgggagtttgagaccagtctggtcaacatggtaaaaccctgcctgtaccaaaaaatacaaaaattagctgggcttggtgatgtgcgctggtagtcccagctactcaggaggctaaggtgggagaatcacttgaacctgagcggctgaggctgcagtgagctgagattgcaccactgtactctagtactccagcctgggtgacagagtgagaccctgtctcaaaaaaaaaattttttttttttgtagagatgggatctcactgtgttgcctaggcttgtcttgaactcctggcctcaagttatcctcctgcctcagcctcccaaagtgccaggattacaggtgtgagccatcatgcctgtctgtaatacctaatttttgaccatttattgaaattgttattttatcagataatctaagttataatgtagttgatcttttaaaagggcatactgtctctctaagtagaaatggctccaaaatgtttttgggaagtttgatacttttatatacaaggtagccttaaccagaaaagtgacaatttaaaattgacaaaatgatatttttaagacttcaaaatgataaataatttttaactattaaagttcgcctcaagctaataaacttaagtctgtaaggaaattaaaattaaatattagtttaataacaactaaatatttagtagaagttgcctctctttattggtgatttatttttaattataaaatttttgaagatctttgcttaaagaccttgatatttgaaatagttggacacttgatgaggaaattgcctttatgattatgaaaatctcagctttataaaatgcatctgttaataaagataatttctctaatggtgatcaaaatataaaacttaagacattaatatctcactggaagtgtatatgggtttctgagtaattaaaacattcataagcagaataaaatgcattctcagaaaactagaaatatcagggaccttgcttaactttgtaaaagacatctacaaaaatcctacagctaatgtcatatttaatggtaaagatggaatgttttcctcctaaggtcgggaacaaggcaagggagtctattttcactacttctattcatctttgtcctggaagtcctagctagtgtaatgaggcaaaaacgcatgcagattggaaaataagtgatgaactgtctatttacagacattattgccgatgtagaaaatcccaaggagtctataaagaattcataggacaaataaattaggttagcaagttcacagactaccaagtcaattaatataaaataataaaatgtatttctgtagactataaacaatagtctatggcacaattcaaatttgaattgttcactgtctgtctgtttgaacaattcaaatttgaaattaaaagcaatttaaaattgtatcaaaaattaaatatctaggcctgaatcaaacaaaatatgtgtggatctgtatgcatgaaagttaaaaaactgatgacataaagatctaaataaaaggagagatatactgtagccatggactggaagactcattgttagatgtcagtattcttcaccttgatatgtacattcaaagcaaacttaacagccttggaggatttttttttttttttttttttgccaggggtagggggtcagtattgtaaagctgattctaaaatgtgtaaggaaaggccaaagaactagaatagctaagacaattttgtaaaagaagagcaaagtttagggacctgattctgaggctttttataaaggtgtagtaatcaagacagtatcttattggtgaatggaagaacatatagattgatggaatgtaatggaatatccagaaatagacccacacaaaaatggccaattgagttttactttttatcaaaagtaagaaaacttattttgcagaggggttggttttaaaaaaatatttagattgattttattggataagcaatgtatgaatatatatgtcctattcaaaatgatagaagtctatagagctgaaagtgaaagtctccattacctcaccccaatctgtttttgttgtgctgtaattttgtttttttctttttcttttttttttgtgtgtttttaaattttattgtattttaagttctgggatacatgttcaggacatgcaggtttgtcacacaggtaaacgtgtgccatggtggtttgctgcacctatcaacccatcacctagtattaagccctgcatgcgttagctatttatcctgatgctttcccctcccctgcccccactgacaggccccagtgtgtgttgttcccctctctgtgtccatgtgttctaattgttcagctctcacttacaagtgagaacatgcagtatttggttttctgttcctgtgttagtttgctgaggataatggcttccagcttcatctatgtccctgcaaaggacatgatctcattcctttttatggctacatagtattccatggtgtatatgtgccatgttttctttgtctagtctatcgttgatgggcatttgggctgattccatgtctttgctattgtgagtagtgctgcagtaaacatacatgtgcatgtatctttataatagaatgatttatattcctttgtgtatatacccagtaatgggaatgctgggtcaaatggtatttctggttcttgatccttgaggaattgccactgttttctacaatggttgaactaatttacattcccaccaacagtataaaagcattcctgtttctccacagccttgccagcaactgttgtttcttgactttttaaataatcaccattctgactggcatgagatagtatcttgttgtgattttgatttgcatttctctaatgatcagtgatgttgagcttttttccatatgtttgtgtgtcacataaatgtcttcttttgagaagtgtctgtttatatcctttgcctactttttgatgggttgtttttttttcttgtaaatttgtttaagttccttgtagattctagatactagacctttgtcagatggatagattgcaaaaacattctcccattctgcaggttgtctgttcatgctgatgataatttcttttgctgtgcagaaactctttagtttaattaggtgccatttgtcaattttgctttggttgcaactgcttttggtgttttggtcatgaaatcttttcccatgcttatgtcctgaatggtgttgcctagattttcttctagggtttttatagttttgggtttcacacttaagtctcgaatccaatccatcttgagttaatttttgtgtaagatgtaaggaaggggtccagtttcaattttctgcatatgggtagccagttttcccagcaccatttattaaatagggaatcctttccccattgcttgtctgtgtcaggtttgtcaaagattagatggttgtagatgtgtggacttatttttgagatctctattctgttccattggtctgtgtgtctgttttggtaccagtaccatgctgtagccttgtcatatagtttgaagtcaggtagtgtgatacttctagctttgttctttttgcttaggattgtcttggctatatgggctcttttttggttccatatgaattttaaagcagtttttttctaattctgtgaagaatgtcaatggtagtttgatgggaatatcattgaatctataaattactttgggcagtatggccattttcatgatactgattcttcctatccacaagtgtggaatgtttttctatttgtttgtgtcctctctgatttccttgagcagtggttagtagtactccttgaaggggttcttcacatcccttgttagctgtatttctaggtattttattctctttgtagcaattgtgaatgggagttcatccatgatttgtctctctgcttgtctgttgttggtgtataggaatgcttgtgatttttgcacaatgattttatatcctgagactttgctgaagttgcttgtcagcttaaggagcttttgggctgagacaatggggttttctagttataggatcatgtcatctgcaaacatagacaatttgactttctctcttcctatttgaatactctttatttctttctcttgcctgattgccctggccatagcttccaatactatgttgaacaggagtggtgagagagggtatccttgtcttgtgccagttttcgaagggaatacttccaggtttgccaattcagtatgatattggctgtgggtttatcataaatggctcttattttgagctatgttttatcaatacctagtttactgagagttttttaacatgaagggatatttaattctatgagaggcgtttttctgcatctattgagataattgtgtggtttttgtcattagttctgtttatgtgatgaattacatttactgatttgcatatgttgaaccagccttgcatcccatggatgaagccagcttgattgtggtggataagctttctgatatgctgctggatttggtttgctagtattttgaggatttttgcgttggtattcatcagggatattggcctgaagttttacttttttgttgtatctctgccagattttggtatcaggatgatgctggcctcataaatgagttagagagaagtccctccttttcaattgtttggaatagtttcagaagaaatggtaccagctcctctttgtacctctggtagaattcagctgtgaatccatctggtcctgggctttttttggttggtagactatttattactgcctcgacttcagaacttgttagtggtctatacagagatttgacttcttcctggtttagtgttggaagggtgtatgtgtccagaaatttgtccatttcttctaaattttctagtttatttgcgtagaggtgtttataatgtttttctgatggctgtttgtatttctgcagggtcagtggtgctatcctctttatcattttttattgtgtctgtttgattcttctctcttcttttttagtctagctagcagtctattgattttattaatttcttttcaaaccagctcctagattcattgatttttttggagagttttttgtgtctctatctccttcagttccattctgatcttggttatttcttgtgttctgttagctttgggatttgttcttggttttctagttcttttagttgcaatattagggtgtcgatttgagagctttctagctttctgatgtagggatttagtgctataaatttccctcttaatactgctttagctgcatcccagagattctggtacattgtctcttgttctcattgtttttagaggacttctttacttctgtcttaatttcattgtttacccaggagtcattcaggagaaggttgttgaattttcatgtagttatgtggttttgagtgagtttttaaaccttgagttctaatttgattgcactgtggtctgagagactgttgtgatttcagttcctttgcatttgctaaagagtgttttacttccaattatgagatcagtttttgagtaagtgccatgtggcactgagaagaatgcttattctgttgttttggggtagagagttctgtagatatctatcaggtccacctgatgcagagctgagttcaagtcctgaatacccttgttaatttactgtcttaatgatagtctgatattgacagtgggtgttaaagtctcccgctattattgtgtgggagtctaagtctctttgtaggtctctaagagcttgttttatgaatttgggtgctcttgtattgggtgcatatatatttaggattgttagcttttcttgctgtattgatccctttacgattatgtaatgcccttctttgtcttttttgaaccttgctggtttaaagtctgttttgtcagaaactaggattgcaacccctgctttttcctgcttttcatttgcttggtaaattttccttcatccctttattttgagcctatgtgtatcattgcatggagatgggcttcttgaatcttgaatacagcacaccaatgggtcttgactctttatccacattgccaatctgtgtctttttttttttttttttttgagatggagtctcgttctgccacccaggctggagtgcagtggtatgatctcagctcactgcacttctgcctcttggattcaagtgattctcctgcgtcagcctcccaagtagctgggactacaggtgcatgccaccatgcctggctaatttttgtatttttagtagatatgtggtttcaccatattggtcaggctggtctcgaacttctgacctcaggtgatccacccgcctcggcctcccaaagtactgggattacacaacatgcatgaaccactgtgccaggcccaatctgtgtcttttaattggagcatttagcccatttacatttaaggttaatattgttatgtgtgtttgatcctgtcatcatgatgctagctggttattttgcagactagttgatgcagtttcttcatagtgtcgttggtctttgtacttcagcatgtctttgcagtggctgatagtggtttttcctttccatatttagtgcttccttcaggagctcttgcaaggcaggcctggtggtgatgaattctctcagcatttgcttgtctgaaaaggattttatttctcctttgcttatgaagcttagtttagccaaatatgaaattctgggttggaaattattttctttaagaatgatgaatattggcctccactctcttctggcttgtagggtttctgctgagaggtccactgttagtctgatgggcttccctttgtaggtgacctggcctttctctctggctgttttaacattttttccttcattacattcttggagaatctgatgattatgtgtctttgggttgatcttctcatggagtatcctactgggattttctggatttcctgaatttgaatgttggcctctcttgctgggttggggaagttcttctggatgatagcctgaagtgtgtttttcaacttggttcctttctccccatctctttcatgtactcctatcagtcataggtttggtctttttacatagtctcatagttctcggaggttttgtttgctctttttctttctttctttttttttttttgagacggagtctcactctgtcacccaggctggagtgcagtggcacaatctcagctcactgcaacctctgccccccgagttcaagtgatctcctgccttagcctcccaagtagctggtattacaggcgcctgccactgcgcctggctaatttttgtatttttagtagaaacggggtttcaccatcttatccaggctggtcttgaactcctgacctcgtgatccacctgcctcagccttccaaagtgctgggattacagggatgagtcaccgagcctgtgcttgttcattccttttcattctttttttctcagtcttgtctgcttgccttatttcagcaagatagtattcaagctctgatatttatccttctgcttgatacctgtgttcgcatcacgaagttcttgtgctgtgttcttcagctccatcgggtcatttatgttcctctctaaactggttattctagttagcagctcctatgaccctttatcatggttcttggcttctttgcattgggttaaacatgctcctttagcttagcaaagtttattacctactttctgaagccttctgtcaactcatccatctcagcctccacccagttctgtacccttgctggagaggagttgtgatcatttggaggaggagaggcactctggccttttcagttttcagcgttttttcattgattctttctcatctatatgagtttgtctagtttcaatctttgaggctgctgactgttaatcaaggaaaatgacaagaaaagtctcaatcattttaggagatttatttgccaaagttaaggatgcacccgggaaacaggtctatgcctttctctgaagatgattttaagggctccaaatttaaaggggaaagggtgggatattgagaagtatacagttttcatgcaagtgaatctgcatttttacatacaaggacataaaaggggcagaggaaaaatgtggggaatcagcattttacataagataacacaaacagaatgtggtagggaaacaatcagatatgcattagtgtctgtgggccaggatgacagcacctggaaagataagctatcaatttgcattgccatggtgaagttttaaccattcactaggaatatccttgtgggcaaatatgggggaggcatgtagcttttcatcttgtagccatcttatttaggaactgaaagtgggaggcaagtttgcatgacccagttcccagcttgactcttccttttagccagatgcatttggggtcccaaaatttaatttcctttcagtgttttttttcattcattctttctcatcttcataagtttgtctagtttgaggctgctgacctttggatgaagtttttgtggtgacttctttgttgatgctgttgttgctttctgttagtttgtttttctttaacagtcaggcccctcttctgtaggactgctgcagtttgctgagggttcacttcaggccctattcacctgggtcccttctgcagctggagatgtcacccgaggaagctggagaacagcaaagatggatgcctgctccttcctctgggatctctgtcctcgaggggcactgacctgatgctggtaggaacgcttctgtataaggtgtctggtgacccctggttggtgggggtctcacccagtcgcggggcacaggatccgggacccacttaatgaaacactctagttgtcccttggtggaggggatgtgctgtgctggggggaaacccactcatctgggctgcctggattcctcagagctagtggaggaaagtaagtctgctggtttgtgaaggccatggccacccctcccactaggggctcaggctcagggagatcagaatcttttccctaaggccctggctggggtagctgaagttcctgcagggaggcctcgcccagtgaggagggatgggtcagggtccagcctaaagaggcagagtccacaatctgccacaactggtgtgctccactgtggggaataccttctgggtccaagacatccaatctccctggcaccagcaggggaaaaacggcagccccgagctgtagtgatggctgttgcccttccccagtgggggttcagccttttaggcagccgcagtgatgggagctcagacgtcgtaagcagcaggcagctgcagttgcagtgatgatggctggccctcctccccagaactcggtagtcttaggcagactccggcccaaccgctgttgagactgtgcagctctgtggttgggacctaaggccctggtggtgtgggctcatgagtgagatctcctgattcacaggttgcacatccatgaaaaaagcagtttccaaggctaggtaacattgaggtgggcaaataaagagagaacgttagagagagaaaaataagtttaaaaaaggcaagctttctgtactatgctgacacatcccaagggcagtaacaggcatagcctggacccaggtgaggacctgataacattatctaagtggctggagctggaaggaatgtgctctggagactttcccaggggtaacaaagaagtaaattttccctgtgtctttagcataagtaaaagtccctttgaaccccctccagtgtgtgattgtacccactctgcaagttttatgaggtcctgtttttctgtagctaatttcatgcgcgcgtctgtgtgaagagatcaccaaacaggctttgtgtaagcaataaagctttttaatcacctgggtgcaggcagcctgagtccgaaaagagagtcagcaaagggtggtgggattgtcattagttcttatacgtttgggataggcggtggagttaggagcaattttgttgcgggcagcgggtggatcttacaaagtatattctcaaggatgtggagaatattacaaagtaccttcttaagtgtgggggagaatattacaaagtaccttcttaatggtggggagggtgtatagtacaaagtacattcacaaaggcaagggaatatcacaaagtacattattgcgagggcggggagggtgtattgtcacaaagtcaattgatcagttagggtggggcaggaacaaatcacaacggtggaatgtcatcagttaaggcaggaactggctgttttcacttcttttgtgaatcttaagttgcttcaggccatctggatgtatatgtgcaggtcacaggggatatgatggcttagattcagctgagagacctgacatttctgtcttcttatattaataagaaaaatagaacaaaatagcggtgaagtgttggggcggcaaaatatttttgggggtggtatggagagataatgggcaatttttctcatggctgctttgagcaggattaggggcagcatgggaacctggagtgggaaagattaaagaaagattttggggtaaggggtgatattgtgggtttattagaaggaacatttgtcatatagaatggtgatggcctggatgcagttttgtatgaattgagaaactaaacagaagacacaaggtccaaataagagaaggagaaaaacagatattaaaagactaagaaatgggaggacccaggacatccaattagagagtgcccaagggggttcagtgtaattatttgcttggttggtgagtttttgggctcaatccttgagtttttgatgttgtcatataccaggccagattgatttaggtaaaagcaacactcttcttttaaaaaatatacagagtcccctttttttttagcagtaagtcaaagcctcggcgattttggaggaaaaagaaatgcaaagccaacaatcgtttgttaaagaaggtttagaaacggctaggagagagtgagtgagattgatagtgtggtggaggtagctggggagaggtagagggtggcacaagaacgggaatgagaataagagtgagtgtaaaagtaaagaataggacttcatcagggtgaaagtattggagtgtgccctgtgagcaaagatcatctatccactccaagagggagtcaagagtggcggattggggatagtactaggagatatccgctgtgatggtttggaggaaaaatgtaaactggcagtgtaaacaggggcacgacacttatgagtagttgagaatggtgaataggaatatgactagacagaagatagtagggatgacaagtttttggggtgcaatccaagtgggaggggtgaatgcgtaaagctttgttgggaagagtagggtaaggacgaagagacctaataaaaatgataggatgtattaggcttataagggttactattatcatttaggaatgcgggtgagtttaagggaagtagggttgagtacttgcgacttccaggaggaagaggagagatcaggctgtctgtctgacagacaaagctttattctggaatggtgaacccaatggggagggtcctgcaggcggacagcagttggggtactagagatgactaagtagggtccagtccatcgaggttgtagagtttgaagggtcagatttttaacaagaacttatcatccagctagggtgtcttcatatggctgggaatctggagtaggcaagagaagatgagcagcctggcaaatttcctgtctagcctgctggaagactggaagatagtcgcctagagggctggtgtctggggcaaggttgggtccgagcaagaaagtgcatccatataaaagttcaaatggactgtaccctgtagcatctcgaggacaggctctaattctgagaagggcaagaggtaaaagtactgtccagtcctttttaagttggaggctgagcttggtgaggtgtgtctttaaaagaccattagtccgttctacctttcctgaagattgaggacggtaaggggtatgaagcttccactgaatagagcctgagaaactgcttgggtgatttgactaataaaagctggtctgtgatgagactgtatagaggtaggaaggccaaaccaaggaattatgtctggaaaaagggaagaaatgactgcggtagccttctcagatcctgtgggaaaggcctctatccatccagtgaaagtgtctacccagaccaagaggtattttagttgcctgactcagggcatgtaagtaaatcaatttgccagtcctggacaggggcaaatccctgagcttgatgtgtagggaagggagcgggcctgaacaatccctgagtagtagtagaatagcagatggaacactaagaagtgatttccttgaggatagatttccacgatggaaaggaaatgagaggttctaagaggcaggctagtggcttgtaacctacatggaagaggttctgaaaagatgacagaatagaatgggcctgtgaggctggaaggagatatgttccttggtccaagaaccatttgccttgtgtgagaggagattgataggtggaagttacagtgggagagtaggtgggagtgactgatgagaaggagaaaaactggccatgagggacagaagttggaatgctagctgcttcttcagctacctaatcagcataagcgttgccctaagcaatgggatctgatgccttttgatggcccttgcagtgaatgactccagcttcctttggaagtaaagcggccttgagaagagtttttattaaagatgcattaatgatggaggacccttgtgtaatgaggaaacctctttcagcccatataacagcatgatggtgcaggatatggaaggcatatttagagtctgtataaatattgatgcgtagtccttttgcaagagtgagggctcgagttaaggcaatgagtttggcttgctgagaggtagtggagtggggcagagcagtagcctcaatgatagatgtggaagatactatagcatagcctgcctttgctagtgattggtgattaggcttggtggaactgccatcaataaaccaagtgtgatcagggtgaggaacaggaaagaaggaaatatggggaaatggagtgaatacaagttagatcagagagatacagttatgggggtcaggtggggtatcaggaataatgtgggaggctggattgaagtccgggccaggaacaatggtaatcgttgcagactcaacaaagagtgaatatagctgaaggagccaggggcagaaagtatatgcatcaggtgtgaggaagaaaatagattttggaagttatgagaactgtagggagtgagttaagcatagtttgtgattttgaaggcctctaaaagtattagagcagcagcagctgctgcacacagagatgagggctagtctaaaacagtaaggtcaagttgtttggacagaaaggctacagggtgcagtcccagctcttgtgtaagaattctgactgcacagccctgtacttcagctgtgtgtaatgaaaagggttgggatgagttagggagagcagcttttagggttgttttttaaggaatggaaaggggaatggggaaaggatttaggatttatggggtcagctaagtttccttttgtgagtttatataatggtttagtcaggatggcaaaaccagatatccaaaggagaaagtaccttaaccatgcctaggaaggaaaggagttgttgtttgtagaaggggttggggtttgggagattagccggacacaatcagcagggagagcacgtgtgtttttatgaagaaaggtgctgagataggtaacggatgaggaagaaatttgggctttggagggggatatgcaatatccttttgagaatagatgttggaggagcaggagggtgccctgttgggaagacttgtagggtgggctataaaggagaaggttgtcaaaattttgaataaggtgagaagcagatggacagaaagaaagtaaatcatgagaaagggcttgactgaagtaatgggggctgtccctgaagccttgtggcagtacagcccaggtaagttgctgggactgatgggtgtcagggtcagtccaagtgaaagtgaagagaggctgggatgaagggtgtaaaggaatagtaaagaaagcatgtttcagatccagaacagaataatgggttgtggagggaggtattgaggataggagagtatatgggtttggcactatggggtggataggcaagacaatttggttgataaggcaaagatcttggaccagcctgtaagacttgtctggtttttggacaggtaggataggagagttgtaaggagagtttgtaggctttaagaggccatgttgtaacaggctggtggtaacaggctttaacctttttaaagcctgctgtgggatgggatattggcgttgagcatggtaagggtgattagattttaatgggatgataaggggtgcatgatcagtcgccaaggagggagtagagggatcccatgcttgtggattaaggtagggagatacaaggggaggattcgaaggaggctatgaactggggaaaagggtggcagtgaggtgtggctgtagcccaggaatagtcagggaagcagataatttagttaaaatgtcttgacctaataaggtaactgggcaagtggggataactaaaaaggagtggataaaagaatgttgtccaagttggcaccagagtgggggagttttaaggggtctcgcagcctggccgtcaatacccacaacagttatggaggtaaggggaacaggcccttgaaaagaaggtaatgtggagtgggtagcctccatattgatcaagaaggggatggacttaccctccactgtaagagttacctaaagctgtgatggtccaggaggtttccaaggtgatcgggcagcgtcagtcttcagccactaagctgagaagatctgggaaggagtcagtcagagagccttgggccagagttccaggggctctgggagtggctgctaggcgaattggacagtctgatttccagtggggtccgcacagatgggacatggcttaggaggaatcccaggctgtgggcattcgttggcccagtggccagatttccagcacttgaagcaagatcctgggggaggaggtcctggaggaatgcctggctgctgtggtttaggagtttcaaagttcttgtgtgctagaaatgtgtgggtggggtttctctcacagtggaggcaagtaattgcaactcagaaatatgttggcacttggctgcctcttttttattattgtacaccttgaaggcgaggttaattaagttcttttgtggggtttgagggccggaatctaatttttggaactttttctaatatcgggactggattggataataaaatgcatattgagaataagacagccttctggcccctctgggtctagggcagtaaagcatccaagggttgttgccaaatgggccatgaactgggctgggtttttatatttggtgaaaaagagcctaaatgctaactgatttgggaaaggtctgatagagaaaaaggagcattaaccttgactatgcctttagctccagccacctctttgagaggaaattgttgggcaggtggcggagggctagttgcggtacaaaactgtaagccagaccaggtgtgaggaggggaggtgatagaaggattatagggtgggggagtggaggccgaggaagaattgggacctggctcagcctggcgaggagcagcctggggaggaggggagaggtcagatgagtctgtagtaaaggaggattcaaaggactcagagcttggggtggagactgaaggaacagtcaggagagaaagaaggatttgggatgggtcgcattgtgagcagagactagggaggaaccgaggtgtaaaagaatgcctggacatcaggcatctcagaccgtttgcccattttttgacaaaaattatctaggtcttgtagaatggagaaatcaaaagtgccattttctggccatttagagccattatcaagtttgtattgacaccaagtaatgttgcagaagaaaataaaatgcttaggttttaggtcaggtgagagttgaagaggttttaagttcttaagaacacaggctaagggagaagaaggaggaatggagggtggaaggttgcccatagtgaaggaggcaagcccagagaaaagagagggtagagacatggaggaggagggagtggtacttgccacccaggggaggtggtgcttgccacccaggggaggtggtacttgccaccaaggtgaaggatcaaggcaggcatccccgcagtgatcagacatccctgaaatgtgggtgaataatcaggcaggcatccccacagtgattaaacaccaacggaagactgtctggagtgaccagcgctggagttttgagtttatggataaaacacgtctcttctgtctctaccagaaagggaaaggaaccaaaattaaggaagggagagattgaagggtggagcaacagcaagagaggttggagaagagagtgaaaagaccgcttacctgatttgaaattggtgagatgttccttgggctggttggtctgaggacccaagatggtaggtggatctcctcatggagtgagggtgaggacaggggactggtctcccgaaggagtccccctcccccgggtctttggcaccaaatgtcacgtgtgtctgtatgaagagaccaccaaacaggctttgtgtgagcaataaagctttttaatcacctgggtacaggtgggctgagcccaaaaagagagtcagcaaagggtggtgggattatcattagttcttataggtttggaataggcaatggagttaggagcaatgttttgtgggcagggggtggatcttaccaagtacattctcaaggatggggagaatattacaaagtacttttttttttttttgacggagtcttgctccgttgcccaggctggagtgcagtggcgcaatcttggctcactgcaagctccacctcccaggttgacgccattcttctgcctcagcctcccgagtagctgggactacaggtgcccgccaccacacccagctaattttttttgtatttttagtagagatggggtttcaccatgttagccaggatggtctcaatctcctgacctcgtgatccacccacctcggcctcccaaagtgctgggattacaggcgtgagacaccgcgcccggcccaaagtaccttcttaagggtgggggagaatattacaaagtaccttgttaagggtaggggaggatattacaaattaccttctcaagggtggggagggtgtatcatacaaagtacattcacaagggtgggggaatatcacaaagtagttatcacaagggtggggagggtgtattgtcagaaagtcaattgatcagttagggtggggcaggaacaaatcacaatggtggaatgtcatcagttaaggcaggaactggctattttcacttcttttgtggatctttagttgcttcaggccatctggatgtatacatgcgggtcacaggggatatgatggcttagcttggactcagaggcctgacactaataactgtaagtttctgtttttcgtctgagctgcataacaaaggtcacaagacatgttcgagtaagcctagattgtagccctccaggcaccacagcaaaggacataagtttggacaagattcctttgagcataagctagataacagccatcggggccacatagcaagagacacacgtaaacctgagttatgaacctgtcactgtttgataaactgcctttgttctgcttctgtacattcacttttcatgccactcagaagaaggtgtataagcaagaccctgtctttgttcagggcgcagtttttggatgttaagtctgctgggtctgagtgtactcaataaagatgctcctgtatttcaccctcaggtctctctggtcctcctgattcctgcaacaacacaatcactcactgccttttttggctgaggatgggggctccccttgtcccctgtggctctccagtgttggttttatgatacatcaaaaactaatattatactttcatattctcattgcttgtttcatatcagtggcagcaatttttccaaataatttagtatacaattaaagtggcaatgtagagtttacttaatggacttgttataattaggaaccagttttatacacagagaatccataaaaatacaacttttttgctattttatcctttggctatgcaaaaagttgttcaatgtttactgtaggtgtttgttttaagcatgcaatacagtttatagtggagataccttctgacaagaagtaaacacccagaagtgatttttgtcttcattagaactcattactatttgtctgttttccaagatgatacgatacatcatgatcttatattttaaaattctgtttctatatgtaatttaaataagttattttacttatacaattaatgtttcattctgtatttaaatttcctgtaagaaatattccttgatttaataatgaggagctttgttatttttttaaaatatggtgacatgtttctttataattatgtacaattttttttacttctagcaacataaatactgagtcatttattctttattgctcataccccagggtagttgttgagttatcttacatgatgtaagtaccgtcttttgcagtactttatactcttcgtttgttttgttatagccagaacattataaaatccagttcttagatcagacatatgttgaaagtaaccctttttccacttgaattgttaaattgtttaatctagcatctttactcctacaacttgcagtaccattctttgttccagcacattggatgtcacctctatatcagttggtcctgtcccaatagtggcagaatgatatcaaaaagtgaaggtctcagtgtaatatgaagcctcagtttttaaaataagtatgtatatctgttggatattctggtggtagtctcaaaaggatgacctgataaactgacaggcatctttaattaatgggacaacactgagaggtattcatatggcaataaaaagagaatagaagagttaagcaataagccacccacaccgctctgtgagcataatggatatgatcacacccacattgccaagtgtgtctgccaaaacatatggaaatacatctttcttctagcactcatgcctcattaatggctgtaactgtttcacagtcatggtgtccacgtatatgatactaatggctatgattagatgagtcacatcttcattgagtagctcaataggtattgttatgggcatagataccaatcaggtttactaccagccccgtagctgagactggtgttaatatgtgtatctagtcctagaggatcaattgaaccactgactaacacaaaaacaagttttgccattagaaaaatctattaatagaaacccaaacctcaccattatgaagtatatccatgtaacaacctgtaaatgtacaccccgagtctgtacaaataaaaaagattacattatgatgaaatggtgaaacagaaagctttgttacatggaacttttcctgttgcattcaaaactgcttcattaaatagtcctgcagaatagactctacgactttcaaagctaggagaaattggagtgaccagtttattccttttatgaagaattatccctgagatgccgaacatctgtgtgtcagaagctcccagctaactttcaaaaggcagtttaatttccaataatagtaattcaacaaaactgagagtttaaattaggcaatttaactaataggcaagtattctttgttgtgcttcacatttattttggaggtccaagatctgcaattatgacaaaaaccaccaccaccacctgagggtacattctgtttggccttaaataattatagtggcccccaccccatgtcagaaattggtttcagagtggactagtgaccctgtttttccaatgagaaaggaaaaaagctgtggggcttctaggaaggtccctccttcctaagaaaaagactgagaatctctttggatctctggacattgctgtgtttggatgtgataccagaactgttccatccatgtgccaggagcctggaggcgaaaccagtacagtcaggaccacaaagcatagatgaacacaagctgggaccttgaggacatggatgagtggctgaatcaaacagccctaaaacttgtttgaccttagaactttcaaatatgttagagaatagattttctaatagcttaagcctgcagaggaggagtgggagtagacagcttgtcgctgtgatggctgccagtggctgaaagtgatttggaagaatcatcacattctggatgtaatgtaatgttttggtttggtttttacaaatctgctatcaaattgatgatgtggctcatacttggtaatggtgtcaaggaaatacagtacattagagctgctgctcagagtggaaaggtgcatgttaggaaagaggtcaattccttcaaaacacttgtaagtttgttttaataccaattgaaatacaaatggaattttcttggagaaaagaaaaagtctattaataaattgagagagaatttctatttgggtgcacccataggagaaaaatcccattgcattccatcttttcatcagggcagcaataaatatcatgactaaaacacatctgtcatagagtgtgtgaaatacatctgagatgagacccagactgctggtcaacacatcatagaatgattctacagaggcaaaaagcgttccgtcctctcttagagggagatgaaaagacgttggtagacaaaatgaagacctagtactcactatcactcctccagacaggatgtgttctgcactttcctggtatgccattttgttcatagcctgaagtcagactgttgttggatgtattcagaaatttccaaagcactaataaaaacaggaaaggatcaatcatggggacatttggaaacttccattttgactgaacaaatggaatccacgtagatatccaggattacgacaaagaagataagcattgtggaagccataaagggagaaatccaagatttatctttaacctcagttgtcacaggaaagacaatgacccatgggcacaagagaagcaggaaataagatgggataaagcttgaagacttttggctccactgatgtctatagagagctttctgggagctgtatgaaaaccagctttacaccacaaagccaagactagcaataatattccatgcttgttatctgccatgtctaagaaggcaatggttgtgtaaagcatgtaagttagagccctgaactaccctaattaaatggggtgttcagccgttttagccttgagatcatcactgtcaaaaaacagcaataaatagatgacagcaataatgaagaaagcagtcccctgtattgaagttctgctctgtgttacaaaaagagcttggtttatggctgtatttcttagagatgagagacaaaatatacagacaatggccagaccacatataaaaacagaactctgacccataacctacagcagcctgcctaggaaatcaacccacttttctacaataaacagcccaggaagccacttgctgtaagtcacacttgtaggaagtcagactttctctggtaacaatccaggaaactaaacagtaactccagtaacagtcagctccaaatggccaggactttattaataactgacaacttcccaaatttttgttcctgtttctaacttaggagcaacgtaggaaagccaaatacgtaccctaaaccaatcccataggatgctgtgcatctagttagctatcctcagcttccccatgccaacagcctccaatcagggaacatgcgaaaaaaagggtgataccttttccactataaagctttcctactcctctgctggtctttgagtctctcccaaaatggaagtgatggtggctgacttctttgttgtagaatagatagcctttactttcttatttggttagtctttgttttcacagaagttattggcgaactccatttattaaagtcatgggtgctgatatggtttggctctgtgtccccacccaaatcttaccttgaattaccccacatgttagggagggacatggtgggaggtgattggatcatgggggcagtttccctcattcttttctcgtgatagtgagtgagttctcctgagatctgatggttaaaaagtgtggcactttctccttctctctctcctgccaccatgtaagatacgccttggttcccctttgccttctgccatgattttaaatttccagagaccttcccagccaagcggaactgtgagccaattaaaccacttttctttataaattacccagtctcaggcagctcttcatagcagtgtgaaaattgactaatacaggtgctttttgaaaatgcagtttcctggactccccacaggtttacagaatcagaatctctgggagtaaggcccagaaatttgcattttcatccatagccctagtggctctcatgcatactaatattgaggaccagtgtcctagaatatttggtgattatctttctctggcatttgtatcacacctatgttcatccatagccctagtgactcttgtgcatgctaatattgaggaccagtgtcctagaatatttggtgattatctttctctggttttcgtatcacaactatgttatgtgtatgaaatacctaactatccccacttgtgtgtttcaaaaggtccttttgcctacaggagcaggctaaatctcatgacattccccacactcaatcctcacccagaattcctgagctctggggaaggtgccatctccagcctggtttgcaagccagaaacacaggctctctcttacagggaaaatgaaaatacattttaaaaatgtgaataacccccaaaatatcaggtaaggcacataaaacaaaaataaggcggcgtcagtagaaaacacaagacaaaatgaaatgcagcgaatcactggaaatgttgagggaagtagcagttctgggtcaggggaggcagaaacagctacagcttgggagctgtggccagtgtgttctctgagaggtagctatgcagacccaagctaacagccaaccccagaaacctcagcctgattcagattcacctcagggtgaatctggtgactcagcctgagtgggagcagtttcactacccgactctctgtgtaatttaatcttgtgtttgcagccaatacctagccaatacagaaaattaatgtatgggaggaggccagctgctcttgacatggaaagttcagattattttcaagcttcaagaagggaaccagcgacagggataaatgaatgagtagagccacttaccagcaaaaagcgttggaattttttctataccactccagcccctcattgcagggctgctgtagagaactgatgtccccagttctgcccatctcaggtatactccaggaggctcgccggctgacagcttccttgctctgccgcctgtgtgaaggggctgccactctctgttctcaggtcttggtgactgatgatgggtccatttttccttttgttgatgttataagtgggactgttaattctatttttggattgttcatttcccaatctttttttttattattatactttaagttctagggtacatgtgcacaacatgcaggtttgttacatatgtatacatgtgccatgttggtgtgctgcacccattaactcgtaatttacattaggtatatctcctcatttcccagtcttttaagacataccaaataattttctctgtgagtgtgagcttacagaaaagagctctcgttgtctttctggcagcaacaccgttgataatgcattgctggcaatatctacttgtggttttctgtaaaaatgctgtgagtttaaggacatttacctaatagtctgactgggaaatcctagattttagtaattaaaaaaatacattgctttgcctctagcaaataagaacaatgtctctttgctgattcagatatattgaatctttccaaagcatttgctttagttaaagcaatttttgattagtattattctaattagaacaatttttaaatttttacagatgaggtttcactctgttgcacaggctagtctcgaaattctggccccaaggaatcctcctacctcagcctcctgggttgtggggattacatgtgcttgctactgaagcgggccaattagtatttttttaatggacaagttataattgtgtgcatttatttgatacaatgtgatgttctaattcatgtaacggagttctgggaaagtcataccaacctacagtggtacctttgtggaaagattaaatcaagctaattaacatacccattaccttgcttattatttttagttttaatagagccagtaaatcttttcacactcgaatttaacttatattaaattatttatattgtacaacttacacaagttaaattaattaacttgtttatcttatattaaattaggcaattataataactagtaaaaattttatatactggtttggcataaacttaattgattggagtaaaagtaggcaaggatttgattctaaaatgaagccttaaaatcttgagctttattttgactatttttttctcattatgtaaggtactttattatttatttttaaaataattttaagctttaattgagctaagcctattcagtaagtttttcagtatacctagagaataaaggttaattgaggctgcagttaggaagatttctctctttttaaatttttatattttgtagatattttgtaggtatgaggtgtcactatgttgcccaggctggtcttgaactcctggcctcaagtgatcattttacttctgcctctcaaagtgctaggattacaggtgtgagtcattgcaccaggccaagaagaattctcttaaaagtcaatttttttttctgattgaattggtggtttccagtcccttcttttttgttgttttttgtttgtttgtttgcttgcttgcttgatttttttagagacagaatttgtgctgtcacccaggctaaagtgcagtggtataatcatagctcactgcagcctcaaactcctgggcccaagggatcctcccacgtcagcctctcaagtagctgggactacatgcatgtgccatcaagcctggctaatttttttgtatttttagtagagacggggtttcaccatgttggccaggatggcctcgatctcttgacctcgtgatccacccaccttagcctcccaaagtggtgggattacaggtgtgagccaccgcgcccggactaccatctgttcatttttaaaatgaatcttgcttgggactacaggccccagaatggagatagcacttcttcctgcaggaaccagggaccacctcactctcttgacactacagagcctgccttccttagcccctgcttgttaggtgctcctaaatgcaacctttgtggccatacttagcatgcagtgtcctccctcaggctgtgagcatacgtggggctaataatctactgttgattttatccacccagaattaacgtcctgtgttttgccatccccacagccctagggtgggcatccttttcttataaacaaggtaaacaggaggcaattaaaacaataaaaaattttaaagagaagtttagtgttcataaatgtctttaacattaaaccaccgatagtctagaggcagcctttcaaacttctataaattggaatagactttggagatgaatcataacggctgaatagatgcaggtatgtttgtctcccccacagagaaaaccagaatagcaagtagatactcacatttcaaacaaatggtctaggagagaatgctgaggttcaccagagaagagatgggaagcaccagaagtaagaaaagggtttgaggcagcttgcccacctgggattgactgagctgggagaggctcctggaatgtgtggggaagcagtaagagagaaagcccctgggctccacactcctagacaggcttttataatcttggctgtgggagaaaccccggactcattagggcctccggcctgacatatgaagctgcccaaagatgttgctccagaaagggaacccccacacactcccacaggcatctgaaccctgggcagcctcagatgggcaccattttgagagcccagacatcaggtatctacagacagctgctgccactttactgctgcaaggaggcagaggggagaccaggcactcccatgcacccctgggagagttactgcctccctgctgaaggctgaagttgagacttacacgtgagcagactgcattccccatagcttcttgcccatgctgcttgcctgcgagggacctcagcctctctggttgcaggcccaaggtgcagtttccatagtttaagttcaggctgtgccctgcccttggcctcagtttgagttgacatggctgcagctgtggcccggtttaggagggacagggagtccagactcccttatacatactcaagataatactcaacaccctgctatgggatgatgcttttctgggagggatctctgttttgtctggtcacaagcccacagctggcaccattttgagagtttaacacttggctgtgccccgccctccaggtgagtttgaggtgatgagttccacaccctgctgggagaggaacagggtagactaagctctcttaccaaacagggtagtccaagctctccagggtacaccacacttaggacagtgaccactgcagtactacaagtgactgtgggactggggacaagcctgccaactgatcgcatcttcttgtaacaccaacatggagggcttgggtcccagtgagctgttctaccactgctactgctatctcccatgccacaccagctgcccagaggtctgagaacctgcccacacacagggatcatcgttcccactgcaagcttctaagccagacatctggaggcccaagaatcagcccctagaacctactgactggagccagggtatgctgctctggggcctaaaaacagtcattctcatcccactgctgctactactggggccaaagactggcttagttgacgtccaagttcccagttaaactttactacaacctcaactaatagctgtagcttaagccactgaggaaatcacagataccactgaccctgaatactgccaaagaagtcatgcaaagaccactctactgcaggtcaattgggataatttccctaaccccttcacaagacttgtgacagaggtgcctcactcgctcagcctgtagtgctcaattgctcaccagtgggtggggtggggtgggggtgcagcttgccggcaaggggatgcaggagcccgggtaggtgtgttttgggcactggcaggagcacaactgtgtactggccctgcagcagcatctgggggatgcccacaactcatgaagcctcagagggagtgttacagtcagtgctcttttggctctgccatccatgaatggcttaggtgttgaacagctcggtgtgacagccctctgtatcctgagctcctgctcagtgtccaggaagaatcaggttgcatgaacgaattgaagatggtaaatgtgggggattttattgccgatgaaagtggctctcagcgggaaggggagctggaaaggggatgaagcaggaaggcattcttcccctgaagtctggccatccccagctgggctcctctccaaagctatgtcattgagccatccctctgaagtcaagttgcttctctccgaagttcaactgtagtctccgatgtccagctgcttcgtctcttctccccttgtctgccgtctgccagtggagcctggggtttttatgggtacaggacgtgcctcctgttcctatcacagtgccccaaatcaaagtgtcttaacaacatatattctcaggaaaaaattatcccctacaaaagcaattttaacaaacttgactttaacagacttgactgctacaccagatgtgtagatatcaacagaaggacacagtcaccatgaaaaagcaggaagataggacaccacatgaaagatcataacaattttccagcaacagatcccaataacaaagaattcctcaaaatgccagataaagaattaaaaatattgatcttaaagaaaatgcaatgcaatagaaatctgaaaaccaatacagagatatcagaaattcagtttgggatatgaatgagaaatttaccaaggagatacagatattataaacttctataatttggttattgcatagcatgatgcatatagtaaaaaaatgtatatttcaaaactattaagagagtaaatttcaagtgttcttaccacagaaaaatgagaaatattgaaggtaatagatatgttaatttccttgagtttaattattccacattgaattcatcagtcatgctgtaccccataaatacaactataatttgtcaatttaaattaaaaaattaaaaaataaacttaagaagccttaggtttatttttaattcatatccaacttgtagccctttttaaaataatttatttgcatttcaagatacatatttgatggaacatgtacatttttcagcgcttagaaagttccaggcaccactatagtggtggctcactcctatagtcccagcactttgggaggtcaaggcaggcaaattgcttgagctcaggggtttgaatccaatctgggtaacataatgaaaacctgtctctaccaaaaaaaaaccaaaaaaccaaagttagccagatgtggtggcatgtgcatgtagtcccagctactcaggagaccgaggtaggacgatcacttgagcccaggaggttgaggctgcagctgcagtgaactgagatcatgccactgcactccagcctgggtgacaaagtgagatcctgtcttgaaaaaaaaaaaaaaagaagaagaaaagaaaatttctaagattttcctcccatcctacttactccaacactcatagcctgagcatcttcccaagatgcatctcaacagcccactgagaggagtagtattttctctcagctgtggagaaagaaaaattgaggaattatgagacaaagacaagaagagaggaaagatgtcagaattagccagagataaaacaacggtgtcgcacgtgacgactatctgaggttagtgtcacgtgagtagtaaaaagaattcaccaagacagttgtaaagaaaggcagattttttagaaaatgtaggtaaagaaaggcagattttttagaaaacgtagaaaaattgttgcaagaaagcaaaggcaaaacagcaagtgcggagctgactgcaaagagacaaaggcttgctggggattttataggttggtgcttgtgctggagagagctacttagagtactgataatggtaaggttgcagtgagctgatttgcatatttcttttttaatgaaatttaacttggcttttactgcatttttaaaatgtaaaaatgtaaaaacaaacacaacatagtatttcaatgctgtacctttatgcaaatgacttcatctatctttttaaaacatgctgtgatatagctaatgttaaaactgacacagcttcactttcttctttttctctgtactgaaagctgcagaaatacacctttaattccaagacaatttggttgaagccctcaaaataaaaagtgtacatccacttccattgccctgactttccccacattgttgattgtgattctctgtgccatgttggtagatcaggcaggctatatataatttgcacaaaacatctttagccagggtaaggttttagaaactatcttaaaaagaaacttgtcaaaatatttttgatatttaggacaaatactaaatattataattttctcccagcacatctgtttacacagcctagttagctagctgaccctgttaaagatcagcttatggaacaaataggtgaagtcatttcctgagccaaaagatacagataataaatgttaataatagcagcagactaaaaacattcctttttgttgtttgttttccatagtcaacagttttagcacaaggactttagaaaatgacagatttttttggtaaagtttactgcctgaaaagagtttaataaagaacatccaaggcctgattgctgttattctgaatataacttttaattactttctgtaagttacattcggttactgtcagacaacttactgttgcatggaaaaatgccccaaaaaactgcaatggtttacatacattttacattacacgtattacctcttaaaacccccaacagaataaagtcttagcaaacacaaattttaatttctgaacacccttccagtaagattgtaaaggtgggaggaaggggaggaaggacttgttttttgtattcctagtctacttgattaaaatgtaatcttccaagggtttgtttagctcactatccagactgctagggttatgatgaacattattacttctttccagggtaaaaaaaatgacatttgaaaataatgtaaatgctatgacatgattttcccaagcatgacctcaacttgaaacattagattacttaagaattctaaagattggtataccaccactgcaccagaatttttaattattccaacagctacaggaattttttaatagtttttttaattttatgaacttaaagctgaagaaaataaccgatttagaaaccataataaaaggacagatatttagccagagatatcagttcctcctgaaaaaggatactgacctcctctcactgcagtttttctccaggtatcttactgatttcagatagaatttaaaattcatcttaaaaatagaaacaaaaggactacttaaactgacattaactaataaaaatatgctcaaatttactgacagaatcatggacacttcatacaatacttagactctaccagttttaagtaaagtaaggaaaaaattataattacaaagccagtctttccccttggggaaacaaaaaagccacttttgaccaattgttccctgcatatacatatactgtatattattataagcttcttcagagaagcaaaacatctttgtcttcctgacactggattatttagcatgtttttttacatcaggaaggcaactgcactgcttgcatttttctaccagctgagtgtctggtgatagctgggtgcaagaagattgtgagttatttatgcaggaggactgtttgtcctcgaccatgaagaaaggcagacttatagcttatctgcttcttctttttgctttcccctgctgccaccagcctgactcttttgccgttagaactccacaaacaggagttcctcttcaagccctctgtatccctcatccctccctcattcctttagttaagagcaaggtagggacctttacctggtacagctccgggagatgggagataagtgacactgagacttcatacccagaaccctcaacttcacaagaaacttctgctgggggccaaaagactcgggacagcagagctcaaagcagggccagaaggtgcaggtggagccacagcggcgggtctcctttaaggataagatggcatcatcataacagcactgctctgaagggttgtagatcttgttcccacacctgggtgtcggctggcacagccacagtcctgagccaacaggagcgtctgggggcagacattgatggtgtacatccaaggaagaacagatactcaattcccagtctcttttcccaacaccacctcttccctcctcatttttccctgtcctgtccttacctgtagttccttttgaacactggaggaggaagactgttatccagcagacaagagctaagggagaaaggaaaaaggttgaacatggagctgagaatgtgacaagtatggaaaaaacaaacaaacaaacaaacagaggttagggtggtttaaaggtggagattatcacttggggctaagtctgtatgggatcccgttcaggcaggccctgagcagcacgctcagtcaccctttgaggtgactagtagggcacaggaggctggaataatgttagagataaagaggaataaatcgggttgaggtttgggagctgcactgggaatgagatgagatgatgtttggatttggggtcctacttgcccaagatgcagcatcgtggcctcatgcttccaaagatgctctaggagaattgaagaagagtggtaaaaggctggaacttatggagacagcctaaatggggttgtctgttaacctggtaagtttactgattggatggctgctgatcatgccacctgcagtctcccaagcacattccttgaagataaccaaagtctcccaagcacattcattagtttctttaaggaggagactgggtggcgtaagggaccacagagccgaatgttgcagactgactcattgcattctccatatactattgcagacctcagggtgaatgagtgtaggttggtcctactccaagttaggcttctaagagttttcaagctccgacattgaggagacagtgcccaactaagctccaatcagagagaatgcttcagccacttccccatctggtttcacatcctccccttcctaatacttgcttcttctatattccccaagcacgatgtctctggaaatgtcaaggggaccgtttatgaagccactttattttttgctctggagtcattagagttgccacctgctctagcagttgagccacggctctggaaactccaataaagggggtaggggtggagaatagcaatggcccaaatctcctggtgtgcttggtgtgaggattcagagacctccagcatcttagttacatggtcagggaaagtactaaacacctgcttttcataatcatattatattagtggccaatgataagtgatgtagtacttaggagtgtgtagtacttaggtgtgcagacagagggaagggcagggcaaactgaggcctgccaggcaagtgccagctagggaagggcttggacaaattcaaataatcccgaagctgtggaaaggacctcagtcttcatggatgtgtgatgattcaatcagaaaatgtctaaggattggccagactttccatcctccacttgctggcacagcatagggaagagttgctgacttaagttcatccagcctgtaccatagcctttgaaatggttctccttttctgagcttcattcttagcttcctgtacatgtgcggaggtgtggggtgtggtttggatgcacaaggctgctctcccctaccccggaacctaagaaggccaacaatgtgaagattcctagtgagcccaggctgtcagcttgtttactaccaaatgttaaaaagaaacgtttgagtttgattaggtaaaatacaaaggacaaataataatatctttaatatacaattatcattcttattccaaatgaaacttcagctttactattgggcattgggaagttaatgtgtacttaatttttcatcttacagaagtggcaaggggcagcttgaagggataatttttaatgcattttataatgataatcatttagagaaatccttatgttgtatctcattaacactaagatgttattgaaagatacactgttgttttgcaactctaagatgcaatctcatcacttagaatgtttattaacagagcttcttgcaacatgttgagacgtagacttttggaaggcgaatagaaaaataaaaatatatgggaaataaatctgttaaagatttcttaaaatgtctccacatttggagactgcctcctgtgaatcatctttcaaccccagattggttcctgtgctttcttacacaacatcattctcagttctaccaacagcattggtcatgcaaagtttggttttattctaagctgctgacacccatactgcaagttatcattgaactggtgacactagccccttctttctttgaattttctttcatctattcctagagattttgacaactccttctgcctttcattatgttgttttccttgtgctaggcaatccttctgtgcctgtctcagaaacaaaatgtgatactcttcatctctttatcttcttgtgccccataaagcacttggttgttgatctgcaagaaaatatgtacttgggttcattcctaaaacaatgagcatgtgcttcattaacagtaaatttacgtcatcgtcttctattaatgtgtcattctgcacacacaacacacaagccaaatcatggtgttttctgatatttaaaatgacagttacactcaacacatgaaacataagcaatccacacaacttaattgaagtgtcaagaatattaacctgaagacttagttcgtccctgtacaactggcagcagctatgtcactctgcttgtctgatagctattgcaagaccctattgatgatacgatgcatcactagttcaagggtatgggaatgtagaatatatatgtacatctctgagtggaggagagtcattccaatttgaaacttagtatatttatgaggatcagatgaagacacacttgaaaagctcccagcacagtagctggagtgtgtcaagcttttcgtattttctctcctcaactgtgctttcttaagaaagctgcaaaatagtctgggcacagtggctgacacctgtaatcctggcactttgggaggctgaggtgggagaacagcttaaagccaggagttcaagaccagcctgggcaacaaagcgagaccctgtctgtaccagaaaacaaaaataaaattagttgggcatggtggtacatgcctgcagtcccagctactcggaaggctgtggtgagctgtgatggcaccactgtaatccagcctgggtgactgagtgagatgctgttgcaaagaaagaagaaggaaggaaggagagaaagagaataagaaagaaagaacaaaatatacacatcttgttccatgaactattgacaatttaggtcataggcaatcattcttagtctaaattttcttgaaggaagaaataactttctgtctggcactaagtttcaacataatttaggtcccggacaatttttgctgatttaatgaaaattatcaatcctcccagaaaattgttcttaaacggatgtataggtagataggtaagatgtataggtaggtaggtaggtgggtagataggtaggtaggtagatagatagatgatggatggatgggtggttggatattagatagatgttagattgatagacaacagacagactgcatgcaatttctttttttttagagtcactaattttacttttttaaaatgttaaaaaatctacttttaattttttcgtaagttattggggtacaggtggtatttggttacttgagcaaaggagccactggccacagaagtttctggttggtgaagcgacaccccaaggatcccataacactttgggaagtatggccatttttaacaatattgattcttcctatccatgagcatggaatgttttcccacttttttgtgtcatctctgatttgtttgagcattattttgtagttctccttgtagagatctttcacctccctggttagctatattcctaggtattttactctttttgtggcaattgtgaatgggaattgcagtcctgatttggctttactgttgttggtgtatgggaatgctagtgatttttgtacattgtacaaaaaatgtacatttgtacattgattttatatcctgcaacttcgctgaagttgcttatcagctgaaggagcttttgtggagactgtagggttttctagatacaggatcatgtcatctgcaaacagggatagtttgatgtactctctttttatttagatgccctttatttctttctcttgcttgattgctctggccaggacttcctatactatgttgaataggagcagtgaaagagggcatccttatcttgtaccagttttcaaggtgaattcttccagcttttgcccattctgtataatgttggctgtgagtttgtcacagatggctcttgttattttgaagtatatttcttcaatacctagtttattgagagtttttaacatgaagaggtgttgaatttttctcaaaagccttttctgcatctactgagataattatgtggtttttgtctttagttctgtttctgcaatgaatcacatttattgatttgcatatgttgaaccaaccttgcatcccaggaataaagcctgcttgatcatggtggattagcttttcatgtgctgctggattcagtttgccgggatttcttgaggattttttgcattgatgttcatcaaggatattggcctgaagctttcttttcttgttgtgtgtctgccaggttttgatatcaggatgatgctggcctcatagaataagttagggaggagtccctccttctcaattttttggaatactttcagtaggaatggtaccagctcttctttgtacatctggtagaattcaactgtgaatccatctggtcttggaaattttttggttggtaggctatttattgctgattcaatttcagaacttgttattggtctattcagggaccgaatctcttcctggtccaatcttgggagtgtatatgtccaaaaatatatcagtttcttgtagattttctggtttatgtgcatagaggtgttgataatattctctgatggttattatttctgtggggttagtgataatatccccctttacatttctaatggtatttattcggatcttccctcttcttttttaatctagctagtgttctatctattttattaatttttttcaaaaaaccaactcttggatttgttgatcttttgtgtgtgtgtgtgtgtgtgtgtgtgtgtgtgtgtgtgtgtgtgtctctgtctccttcagttcagttttgattttgattatttcttgtcttctgccggctttggggtttgtttgctctgggttctctagttcttttagttgtgatgttaggttgtgaagctgagttctgactctctgaagtgggcaattagtactataaatttccctcttactcctgccttagctgtgttccagagattctggtatattgtatctttgttctcattggtttcaaatagcttcttgatttctgcctcaatttcattatttaccccaaagtcattcaggggcaggttattcaatttccatgtaattgtatggttttgagcaaattccttagtcttgatttctaatttgattgtgctatggtctgagagagtggttgttatgatttcggttcttttgtgtttgctgaggagtgtttcgtgtctgattatgtggtcgatttttcaatgtgtgccatgtggtggtgagaagaatgtatattctattgcttttgtgtggagagttctgcagatgtctatcaggcccatttgatccagtgctgagttcaggtcctgaatatctttgttaattttctgacctgatgatctgtctaatactgtcagtgaggtattgaagtttcccactattattgtatggatgtctagatctctttgaaggtctcaaagagcttgctctctgaatctgggtgctcttgtgttgggtgcatatgtatttaggatagttaggccttcttgttgaattgaaccctttactattacataatacccttctttgtctttttttatctttgttggtttaaagtcatctgagattaggattgcaactcctgcttttttctgttttccatttgcttggtagattttcctccatccctttattttgagcctgtgggtgtaattgcatgtgagatggactgcatgcagtttcaagggttcaggttcactgtttatttaaaccaaatactacagggtatgatctcctgaactaagtgggtgaagtacacgtttcctatgaaacagcctttttcattatctcacagggcaataacttctttagagttttgataaatattttagttcccccagcaagcatcagatgatgagttaaagaacataccatgttatttaaaatatggcatttgtttgtctacatgctgtttattgaggttcttggaagcaccttttcattatgtttataaactggttacttgcaagtggttgcttgccagtttaaactagcttaagctgtggcaaaaagaggaatttattatctttggtaggttccaaattaaaaaataaagtgagcaagaactaagattagaagaaatttatgagcttggatgaaggttcccagtatttctcattatttttatgtttaatgatgtatagttccttttctgtaaatgatacactattcagaataattgttttgggttgtttgcttccttcttattaatttataaatgctctttttatatgggagatactaaccttttgtctgttatatgttttcctcgcctttgtgtttgtttctcagtaatgctggtggagtcttcttttttgagatattttaaatttttatgcagcagtgtcttttaccactgccctacatcttctttccactttttggcttccgcttacgtaaggaggccatctccaacttaaagttctatgaatagttctatatttttactttctttttagtcatttttattcacatataactttttctataagatgtgatgctgagtctaagttaattttcttgctaatgaatgtcctattgaatctgaaattacttgttgactagtttcatcccttttcttctaatgtacaatgttacttttcttatatctcagttttccattattagctttatctgttgatggactctgttcaattgatttatgtgtaatttttctaggtagtgtctggttcatttacagtagctttgttttaaattttaataatagacaaaaacttctctccttattacactacattaagctttactcgacaatatttgtgcagtcagctttaagagctcccaagtaattttctaaaccctcctcctaaaaaatagcaaaatttaaaaatgggaattcagatgaaatttttttgtaaacattgtttggctttggaaagcatgagcattctaatgttttaatactttctgtctcagaggtttatcgacttctttttttattaggtctagtttgctgtcaacacccatttaattttacgtaaacatgctcttcgaggctgaagcgaatatgactgattttcagtgtgaaaataaaacataaaaaccccttcttggctcatgcctgtaatcgcagcactttgggtggctgaagcaggcagatcacttgaggccaggagtttaagaccagcctggctaatatggtgaaaccctgtctctactaaaaatacaaaagttagccgggcatggtggcctatgcttgtagtctcagctactcgggaggctgaagtgggagagtcgcttgaacccaggaggtggaggttgcagtgagccaatattatgctactgcactccagcctggggagcagagcgagactccctctcaaacaacaacaacaaaaacaaaactgttcttggagttgtttctaaacagaacttgtctctagtattaacgtagcagaaatgtatatgattttacattagtattaaagataagaatattcttggccaacaggaaatgggttaaagccttgcagaggagggaaacagtgaattttgtcattcacttaaccagttttcacacacacacagagaaagtccagaagcctggctggtaagaaattcttacccttttgctggcatgctacggttttgggttctctttttctgagcaactttggtgaccttgctccctgtggcatagctgtgggggccaagccacgttacaaaagaaaatgatccctttccatttcatggaaccataggcaaaagtctctcctttttacaagaggccaaccagtgggttgcatgggaaaataagatattgaattaaatgcacagaaagaaaacaattcattgggacataagtgacacaaactttggttccacgtgctgtcagttctctccttaaaaagccagcacccaaagttgatagactcacacacccaaacagacagatgacagaaaagtccacaggcttcccctcctcacatggtgtggcaaagagaaagtgaagtggtgaggggttttgaatagagttacaggattgagggccagtatgacagagaaggggagagagaaggagaggaagagggagggaaaacgatagagggagagagggagggagagggagaggaaagaagaagaaagggaaggagggagaaagggagggagagggagaggaaagaagaagaaagggaaggagggagaaagggagggagggatggatagaattgtttcttgggactggaacccaaaccaacttaggccagggaaaaggtacactctgtcccactgcctgctgagttgatcagatccaggtagtcaacgatttcaacctgtccctcacagatatctgttcacgtgacccaaaccactaaggattaggagaggagagacaaggcaccctaagtgacagaaaagttaggaagtgaaaaggagagaaagcaagaagggaagggagaaaagcattgcctgcaggagggatgggggaggcaaggagggctggcaggctggagaaagactcaaccagcttggcgacactgaatcagaagttcaggcagctgcttgtcagccgtgaagggatcttgtccagcagtcccatcagctcacaagtctccccctcagggagagaaaggctccccacatcccattgttgggaatgggtgctcggtgtcacaaaaatcaacactgagacaaaggatctctcagcaaggctagtttactttctgcagaaagagggccgcttgctagcagtcttgccatgagagcacacacgaacaaaggagacagggtcatttataacctgatatgccaccctactgctgtgtctggcttccgttggctggaatgggacctcacattctgtacttgacctgattggctagcaacttagaacttccccaaagaggcaaaggcagaggagaacaaaggaagacaggaagtaacttgtggaatgctgagagaggcaaaagcacttccaaataaggaagaggaataggctatgacctaatgcttgcttgggcctgttcaggcatgccagggcaaatatctaggctaaaatgcggtagctaagaacgcagagtatattgatttctttattatggctagcagatatttaagaatattagcacaggtctttgagtaaattttgcttctaagagaggttactatctattctcaattagactgggaggaaagtccctctgaagaggaacctctacttattttattttctacaccatgatcccaggcaagcccctaaataatacattactggtcttgggttcttgggctctcaatgcaatagaaactgacatgaggtcaaaatagttttcccagacaaaacttcattggagattattcctggaaataagagaggcagcacaaaagagaaagaattccctgatgactccctgaaaagagctggtagggctttttttattaggcaaagtgtgggaattgacatcaggggtagggtatgcaggctgggctgggcaaagcaggagaggtatacggtatgcaggtcagcagtatctgcttaggatggttttcttgaggaagagaccacctggtggtctggcctgtggcagcaaggctgtgaatcagttgttcaacattctttctggaatcttggttgtctcctaagaccagttcttgggattctttaagtaaaaggactattagcaatgaggtagtggcgtgggttttgtgatcagcaggaatgttgtagtacagcagtccctaacctttttggctccagggactggtttcccaaggaagacagtttttccatggacaaaggaggagggggatagtttcaggatgattcaagcacattacattaattgtggactttatgtctattattgttacattgtaatatataatgaaataatatacattatatattacatatgcaactcaccatactgtagaatcagtgggagccctgagcttgttcttctgcagctagatggtctcatctgggagtgacaggagacagtgacagatcatcagacattagattctcatattagataaggagtattagattagataaggagtgtgcaacctaaatacttcacatgcacagttcacaatagggttcatgctcttatgagaatctaatgctcctactgatctgacaggaggctatgcttaggcaataaggtgagtgatggggagcagctgtaaatacagatgaagctccacccactaagtcactgcttactgcctgctatgcagcccagttcctaaaagcagacacactggtaccagtccatggcctgtgggttggggacccctgctctagtaggggtgagatgaagccaagccctgactcttctctgtctcaaggagagccctaggtgcataatactgagaagaggagcagctctgtaattgcagttttaggcacaaggaagcatcattgggcatcctgattatctctttaatgaatattcactgtcactatcttgataatatctgtaggtatcatttacaaaattttcttaactactatcttgaaataattttaaacttacaaaaaagttgtacagttggtttctttctttcacacagattctcataatgttaacatcttaaatgatcttaatacaattattgaaagcaagaaatgaatattgactaacactattaatgaatctacaggctttattttaattttatcagttgtcccctcatgtccacttcctgctccaggatccaatccagaatcccacattgcttttgatgatcatgtctcctttgtgccctcccaactgggatagtgctttgtgttttcttagagtctgtatttctctatttggtatccattaactacagggtttaactcatggtcagagttgtttgcatctcccccgagagccagaacccctgctctgaaccatccgaaccatcccctttagtgtaggggagagaagagggttagataaaaggtttcagtcacttcctacaggaacctcactgaagtaggacacaagttcgtgagacctttgatctgaggtccttcagtgagggaggtaggacctcactgatgcaagaaacatgctggaggaatagcaagttgacctccattccagtcttctgtggctgtgtagatctagaactaatttccacctcaaagggaagactttcctggacaggcttgcagccctgagtggaaacatcccactgcctttgactcctgactccgtatctcttttccagtaacagttgtgtaaatgtttattagctgacaattatctaacaattcttggcttccagacttcacccatgtcaacatttttcaaagtgtggcagcaaacactttcttttctttaaggattctgaatacaggccctcagtcttttctggcttgtagggtttctgttgaaaggtccactgttagcctaatgggattccctttccaggagaccttcccctactttctagctgcatttaatattttttctttatattgaccttggagaatctgatgactgtgtcttggggatggtcctcatgtatagtatctcagaggagttatctgaatttcccagatttggatgtcaacctctctagcaaagttggggaaagtttcatggacagcatcctcaaatgtgttttccaggttgcttgccctctctccctctccttcagggatgccaatatgtggtaggtttggtctctttatatagtcccagatttcttggtggtttcattctttttttaagaaaatattatgtcatgaaaaaactcatcaattaactagattcatacttgtttgaacaagaattgaaaatctattaaataggcagaatgtgggcatcttgttccacatgggaatgaaaagatgctataggttctttaagaattgcacagtgtaaaaaaataacaagaaaggagaaggaaaggggaaaaaatcacatgatattgggagccatctcacattatgaataatctaccaataaacatgtaaaaaataatactctttgtttctgcagtagctttgagtttatagttcttggaatgactgtattccattgaagacatctcagtaacaggaggctgttttagcaatcccatgtgcagatattaataaaaaaatatataaaataatgcaattcatctcttgccatcaccccagaaatcatgacatttctgagaactgttttgcttgaaaatgggttaagctgtaagtttcggctgaagctctgtctctccaacccgtttgagtgcaacattcactagaagctgaaatccactaaagtcctggttgagatccattggagtagggggaggagtgttgaaaagactactctgtgtattggtacttggtctagatttacacatgtcctctgggcacatgagagaggtgtctgtaaagttgttggctgctacctgctgtatatctgtgttttgtcccacaccaactgactggcagagaaagggacatctttcaatgcagtcacagtggcatggcagatcactgatggacgagccaaaactgatcctggggaagacggcttaggagacaatggcctccctagggttgggtttggcccagatgtacaggaatgaaatggggtctcctctagagctggcatgaagtttttgatgcccatcacaaacttcacagagcttgtttcagaaatcttgggcccacggcaggtaattgtgaactgatttggatctttgccatcctttctcagcatgtcaggatgcgtacaccacatgcaatattatctccttcgtaggctcatttatctgagaagcttgtggcgggcgttgatgaaccagttacagacctgtagtgtagacagatatgtttgctgggacaacagtgctttttcttgctcggaaggatggacattgtaatggtgctcatacagccaatcttgaagaatctgcacagactccttgggcaggttgccccttctccttctcttgcctgagccagaggatgaaggaaggtccaagggaatgtccatggaatcgtcatcctccgtctcactgccagatgctgcaacaatacctttcattgtttccatgagtcagtgcagaggagcaggaccctgcgtgacccaggatggggacacctatgcggccagtgtggcccagccttggtccccggcttcagggagagggttttcttcattttaaaaaatgcttttttaaatttttgtctgactgagttgattcaaagaaccagtctttgagctctgagatcctttcctcagcttggtctattctgttgtgaatacttctgattatattatgaagttcttgtagtcagtttttcacctctgtgagatctatttggtcctttcttaaaatggctgtttactctttaagctcttgaatcattttagtagattctttagataacttggattgagttttgactttctacttaaatcttgactatcttcattgccatgcagcttctgaattctgtctgttatttcagccatttcggtctggttaagaaccattgctgggaagctagtgcagtcatttggcggtgagaagacactctggcttttagagttgccagagttcttgtgctggttttttctcatctgtgtgggctgaagttgctttaatctttgaagttgctgtcctttggatggggcttttgggttttacattctttgatgcccttgagggtttaactatggtataagttgggtttagtcaactggtttcatttctggatgatttcatggggccaaggctcagctcagcacttctgggctgcatcgtctaaccctggggagctggtaccaggcccatggctttgtcccctggatcttcagggttaaacacctactgcactagaggggctaaggtgttccccatttgctagcaacaacactccaacgtggggtgttgacaaaagtgcttcatctgggtcacagcagtgggatcttcactcacacatgtgctggtggtgggggagcattgatgtctgtgtgcatgtgcatgctggcaaagtgttgaggggaggctgtgggtgagtgcttgctggcaaagtggtgagaggaggctttggctgggtgcatcctggtgggacctgtctgcaaaggctctctgatagttggacagggtctactggtgaaagggctaaggcagtggcccctgggaagcaccttagtttggcaactgaggctttgctgcaaacagatgtggcgggtagggaacttgggagaggccagcacactgagaggcactcgtatcagactggccccatctcctaggcaagatagtcctattctgtccaggtctgacagtcaagaaaggccaaagccacctagaggagcaaggtgagccttggagaatgagcatccctgtccatgctccactgcagctgtttccaaaccagactctctgggctctacacaggctagagtcctgtccctgccaactctccaagcagctctctctgccagcgcaaatgtccatgggggctgtgggaccttttgcagctaggattctggaggtctctggcaagagtgggccactccatgcctatttaactccccacttccccaggagctgttcagggccaggaacaagtcctcatgctcagcaaccctgtgcagggtttccagcttcctccccttgcagctgagggcctgcctccctcactccactctcaatgccttcctttcgaagatctgcttggtgtatgctggtcttcttgatggtcagtcccttggtgggagaagctcttcctggctgcatctagttggccatctcagctcctctccccaatcaaaaccaattttttttttttaaaaacgaaatcattcaaattgaattctaagattttaaggctgaatttaagaaagaacctctatgcacatgtaagaaatctatgttacatatgaggttccagaaatgttaaaaattagtatgtagaaaagatacatcatgcaaacactagcaaaagaaaattactgtagctaagtgaataccaaggtaggctttaatgcaaaagataaagctagagataaagcaggacaagtaataatgacacagggatcaatccaaatggaacatataataattatgaatctgaatatacctaattacttagcttgaaaaaagtaactaaaataaaagtggaaataagcaagttcacaactgtggtgaaagactttaatacactttttgggatagcttatgtaataaggagaacaaaaaatcagaatgggctaaaaatttgaacaatacaactaacacacataaccaaacttatatgtgtatatgtctatatatatttatatgtgtgtatgtatttatatgtgtgtatatatttatatgtgtatatgtatatatgtatatatagtatgagatacacatatatttcacgcactcacacacacacacacacatatatattttgagacggagtttcattcttgttgcccaggctggagtgcagtgacatgatctcagctcattgcaacctccacctcctgggttcaaacgattctcctgcctcagcctcctgagtagctgggattacaggtgtgcaccaccatgctgggccaatttttgtatttttggtagagacggggtttcaccacgttggccaggttggtcttgaactgacctcaggtgatccacacacctcagcctccgaagtgctggaattacaagcatgagccaccacgcccagcctatatatatatatatatatatatctcaaaatggtagaacttacatgtttttcaagtctacatagaacatttatgctaaattgatcatatgttaggtcataaagaaagtctcagcttccagaggatgaacgttattaaaagtaggtttttgagctgggcacagcggcacatgcctgtaatcccaaatactcaggaggctaaggtgggaggatcacttgagccaaagagttcaagtctaacgtaggcaacatagcgagacctcatctctgaagaaaatgttctctgggactcccagtttctagtcaagcatgtaagaggcttggaactcatcgctccatcttaacagaaaaaatactgaacaaagtaaaaaattaacaactcttagataagtgggatcacagagcaaactactaccctacgatttgttgacaggcagttggatacagagaatcaaaactactgcaacagaaacccatgaccagaaacccctgtgggaaccagtaccaggacaggaaaacatgaagtctaatgaatgaattcctggaggctcagggtggagcagtctgagagttaaaaactccagggggcccagtctaaggggagcctctgcacttttctaagagttttacctccaggaaccctatcaggttctcacagtgaatatgggagaaaaatctccttcatggtctggcatgaagtgggaagggggaaagtaaccgctgtgaaacacaccagagtattctgttcttcttaacaagctctgccattaagagaaagcattttaccagaatctaaattattagggttttatcagagcctaagtgacctggaggaagagagtattatttttatacaggacagtaaacaagtattctttgctctaaagggaaaccttacctctatcttccaaggcagttcactacacaaacatccttgaaaagagtgtggaacaaaagaacagtcaatgcctcactgccaggccagcaaaaatgcaagagatccatgggaaattgtctctgacaccaacaaaccaatatttttgcaaagtaaataaacacatgagcaaggtgataatagtgtgccggaaaacgctgccctgctgcagtggtgactgtgatagtcccgggtgtctgggaagacacgccaggatcacagagtggggcctggttttagaagaatgcaaatctggtcatgagtttcactgcttaaaattattgaacgactccccaccatgtctaggatggaacccaggctcccagctcatcccacaaggcccttcactacctgggcctgcctttccctctagcaccttctccacctacacccatggtggccctctgtcatccagctgaacagccactcctagaaacacccaaaacaggcttcaacaacatgactcacctaccagcacctgcttgaagccctcctcacagtaactcttagttcccttcagggtttctccttctccccatcttcccaccctgcttccaacttccctcactgatagagaattaagcactcactctatgcatcccacaggactcatgcttacctctgtcactgtcttgccattggtcagtctcctgggtatttgcccaacccgaattcaccctaaattatcaaagatatgcatgcaaagaacaaaacttctgtttttgaaagttacaaataaagtatccttctcctccttttacctcacccctcccttgctcatttgctctcctcagagatcagtgctgttagcagattctggcttcagtacctttgaagtttccaataatactctcataattctctctcatgactttagggacccaggtacaccattaccagttgtggaattctaaaaatttacttaacctctctgagctacagtttcctctttaagcacaatgaaataatgacttacaagcatccaataacataaatgtgtgtataaagttcatgtaaactgggaccccacacacaccccttatcatgccaagtgaatccatcttgggaagtatgttggatggaaaattttcagaatgtagaaacttgcattctattattttaagtgacaaaaataataatgttcctagcccagttaataccaccaggtaatttcctcaaacattacaaaaatactcttaaaaagctttctagcagtctatccagggtttctacgtgaaatatagcattgagaagagttattctttgttaacatttactcactggtgagtatgggtatctgaagtaagaaatacgttgcgtaatatctgaatcaaattatctattccttctgcaatgaaaaaacaatgcactgtgatgtaatataaatatacaagtatgttatctatctatgtttaaattattatatgaaagagactatttaaattggactttagtaggcagcacgactggtggctgacagatattattactgggacccatgctgggtgaaaccctctggaaaatggtagggaagatgagagatactgctctgtatgtacagacaagcccagagagctgctgacattggctaattgcactctgcatccttttgcgtgtacttctgccaatttaaaagcttccactggcttctacatgcacattataacagcttttgatacagataatctcatttagcttatcactgtcaagccttcacagcaaatattgttatagtgtaagtttatatagtgaagaatacctgtacattacaaaatgagagaaaatttcatttaactcctataaatgcactggctctgtgaggttgctgggtggaaatgcaggggttgactgttacatgttactgcaattgatgtttgaacaacacaggcttgaactatgcaggtccatttgtattttcttccacctctgccacccctgagacagcaagaccaatgcttcttcttcctcatcaccctcatcagtgtgaagacaaggatgaagacctttatgatgatccacttccactgaacacatagtaaatatattttctctttctcgtgattcttaataacgtgttcttttctctattttactttattgtaagaatgtagtgtataacacatagaatatacaaactatgtattaatttactgtttatgttatcagtaaggctgcccatcaacagtaggctatttgtagttacgttttttgttttcttcttcttctttttttttttttttgagacaagagtctcactctgttacctaggatggagtgcagtggtgcaatcatggctcgctccagccttgaattcctgggctcaagcaatcctcctgcttcagcctcccaaagtactgggactataggtgtgagccaccaggcccagccagtagttacattttcaggaaatcaaaaattacatgcagattttcaactgcccaagggtgtcagcaccccaatccacacattgttcaagagtcaactgtattatcagatggtattgttggtaataacaatagctcacatttataaaccccttcccatttgccaggcactatagatattgtctctgctcaaaccccctccaagggcttccctgtggctcagagaaaatcaagattgtgcacagtggcctactgagctatataaacaggcccttggtctactgtgacccatcacttgccacttcacattccctcactcagacccaacacgtggcctctgttatttgttgaatgccccatgcaggcaaccccaactggggctacagccttaggggattcttccagtaacctgtgggcccacctctcacctctgtcaggcctctgctcagaaaataactcatcacagaggccttccctgaccaccttcacttagcattgtttacagcagcggttggcatactttttatgtaaagagtcaggctttgcaaaacataagtctcttctgcaaccactcagttctgccattgtagtgaagaagcatgaagacaatacatgaatgaatgagtgaatatggctgtgttccagtaaaaccttatttatggatactgaaatgccaacttcatataattcatataatttcatatattttaaatgtgtcatgaaatgttactcctcttttgatctttttgaccattgatacaacacaattattcttagcttctggcagtcgaccctcaagtcatgacttgctgatacctgtccacgtaattctctatctcctaaactcctttgttattttttccatggcatacatcattggttgatatcgtatcatatcgtatcatatcataccatatctcatatcatatcatatcaaatatacttactcgatgtttattttctgtgtcttctaaacaaaattaaaccccttattttgctcactgctatattctttgcagctagaacagcacttagtataaaatatgtattcaaaattatttctgaataaataagtgaatacaaaggtcagtttccacaccctgattttattttatttaaaaacatacagtaagttgactgttttctatgcacaacttaatggatttaaacacaggtatagattcatgtagtcacgatcaaaatcaggttacagaacagttccatcaccccaaacccaaccccaacccctggcattcactctttcctatagttttgcctttcctgagtgtcacaggaaaggctaagttgattcttacctatgtaattgttgagaccaacttcttgtatctgacacggtgcctttgagatcttgccaagtcatggtgtatgtaaatagttccttgtctttttattgctcaaaagtttccattgtgtgtgtgtaccacggtgtgtctcccatttcccctgttgatagatatttgagttgtttccacttttttgctattacaagtaaaatactatgaacgattgtgcttttttggtgggaacataagtttcatttctctgggataaatacacaggagtgtgaatgatgggttgtatggtaaatgtataattttataaaaacagccaaaatgtttttcggggttatatatatataccattttcatttccatcagtaaaatatgagaaattcagtgtctttacttgcttgttagcacttggtattgtcgatattctctctctctctctttcatatatgtttgtgtataatttcataatatctaaatacacatactccggcactttttcacttacacccccagtggccctccctcgtccagtccaacacagtcaatccttgcaacaccccaaacaggtttccacacgtgacttacctaccagtgagtgacccactcaccagattaaagccctccttccagtaactcttagttcctttcagggtttcttctctccaccttcccatcttgcttccagcttccctcactggtagagaattaaggacacactcatatatatgtgtgtgtgtgtgtgtgtgtgtgtgtgtgtgtgtatttatttatttatttatttaatatatatatttaaattttgccaattctagtagatgggagatagtatctcactggttttaatttgtagttccagtatggctaatggtgttgaacaacttttcatgtgcttatttgctatctgtatgtcctcttttgtaaagcatctgttcagatattttgccgatgcttaatgattttgtttgttgtttcactttgagttttgagagtttttcatatactctggattcaagtcctatgttagagatgtgattcacagacactttctgcagttggtagcctgtctgttgcttcacttaacaatttgttcatcaagtttaactttaaaattttgataagtccaatctgtttttaaaaaatggataatgcttttgatgtcttttcccagatataaatgttttctctgatgccttctccttgaaatacgtagttttacttttcatatctagaccatttggagttaacttttgtatagagtgtgagctttggtagaagtcttctttttttttttcatatgcatgcccattgtctcacaccatttgttgaaatgactatcttttcccccattgaattgcctttacatctttgccaaaagacaatttactatatttgtttgggtttatttctggaacctattctgttcctttgatctatgtgtctatccatgtctatccatttgccaatactacactgttgtcattactgtagcttgagtaattgtgaaattggatagtgtgagtcctctaccatctttcctcatccaaaattgtgttggccattctagtttccattgcttttctatataaattctagagttattttgtttctctctcagacaaatcctgcttgggtttgattggaattgtgttaaatctgtagataatttggaaagaattggcatcttacctaaattacagattccaaaccacgacatgatataccactctgtatttaaggtttccttgaatactttaatcgtacacatcctttatatgttctcctagatttacagtataccagttcagtttttggggaggggggtattgtaaatggcattttttttctttaaattattgtatccactagttcttgccagtataaaggaatacaattgacttctgtgtgtttcatacgctacaacctttctaaattcacttatcaggtccagaactcttctactaacaatgcacttttataaagccctaacacctctcctgatctctgtctcaccctcccacctatctcactgtgggatgggaaggaagtcaatggaaaacacaggagcgcattctaataatagcccacatggtatccagtgacacaaataatagtgatggtgacaataaaataacagtaagaaacacagaaggagcgtttccttggacaaagcactccagaaacaacaacaaaaaggggctgcctttccatctattctatgaatcccagatgtctattttatcactgtctgttccttttctgttctccctggcagggtttttacagcccctgctctttttctagattatgctgcatcttcacagtttcccctaaatgactctgaagaattatagacagtgctgtctacaattataataatggatatggtggtccatttccaagacaaagtacctcagataggctgaggcccacaaactatggaaggacagaatatactaggcccatagctggtgcatgcttgtcggggtccccttagttaccctctcccaaaccagagtttagtctagaatgaaagtttactagccagcaaaatagctcactttatctattcttatcagcttgcctgactgcctaggtcataagtcaaatacttgaaaagccctcgagctggctttgattgcaatgtattataggctgcaacaaaatgcagtgagacaatcctaaagaaaacacctaaaagcctcaacccagcaaccaataggcgacgtctgggaagatcgtgaccccatcgtacttagcctacgaggaaccaggggagagacttgtgcactaggggataaatagcttgttgtaaccgtactgggtgtgcctgcctaccagacattcaatcttgcaagaccatcattaaaagtcttgcttccactgttttctgtgtctctgagtccattctttgggtttggacgggtgcgtttgtttctcatagtgcaggtctggagccggactgagatggggagtagagggaccccttgaaacttcagggtggatgaatatgaagtttcatcaccagctgtgatgtttggtgagtagtatgctctcagataagtgagagccaaggaatctctttcaagtctctttgccgtgggcagagttcaaagaatgacactcactcacggctttgaaaggttctagggaagcctttactctgagatttcgagaggtctgagaaggtagcagtcacttggaacaggtccaggaacatcttactaagctgttgatgcagttttttcttatgctttctgtggcttctcatgccccaccctttccaagaggccagtgcttctgggcacctccctaaatgtggataagttcatagcctacataagtccctgtataaagtcactgacccatttgcactgctgctgtcccatcagctgctctgaagctccatggtgcccagaatcttcggtaaggtaacccttgccccaggttgagctaatgcctactgttatccctaatgtacctctgaacctcaaacttaattctctcttccctatttaattcttggtttcccacctcataatcacccgtgtcctctctgactgcattgcaatctctcttccccacctgcaaattccagaagcttaaccctttccagagccctccctgcatttcctcacctgccaagcccaatgcccagaacctgcacacagagtcagtcccaaaatctgctctgagctgttacagcaaccaaagaaactcagagacatcatcttgtgccccatgatcatgatctggtgaccccagaatcactgtcattcttctctcagctgatctttatttttgaactcctgggctcagactcagaagggaccataggtgagaatgggtgtggtgagtggagggagaagaaaggagggaggattatagcactgtggatagggttgggggctcccagaggtcccctgccagctcatcagctctgactcttccagatattggactgtggttgtgccagttgacactcaggagtggagactagatctgcaatctgttgggactgtgatgaggggatcatcctgccctcgaaccagacccagccctgtagcccaggcactattgcctggagttcctgggctctcagcgccaggaaatcatgaggttcagtgtctcaggcatgaggaccgactaccccaggagtgtgctgggtaagtaagggcagcccaggcagtggactgagttttgttgtgtgtattccatcaagatgagcaatgcctgctgtgttcactaacttctttttgggcaaccatctctctctctccctctctctcttctctctctctctcttctctctctctttctctctccctctctttctctctccctctcttttctctctctcccttttctctctctctctctttctctttcccactcacccctcaccctttccacctctccccctcttcccctctccccctccccctcccctccccatctccctgtgtccctctgtctcacatccccctctcttctcttcccctctcccctccctgtcttttccctcctctccttccttctcttccttcctctctcaagttgaaggaagagtagctcagtcatcttccagaattgctttttacctccgagtcacctggctccatagcccccgaccaccgcatgcccatttagctgttcctctctttcccctctaccctcacccttggcaaccaccagtcagctttctgtctctatggatttacctatctgggacatttcatataaatggaatcacaccatttataagtgacctttcgtgtaactttttttttaacttaatgttttcaaggcatatccccattatagaatttattagtacttcattcctttttacaactgaataaattcaattgtatccatgtatcagcattcatttatccattcatctgttgatggacacttgggctgtttccaccatttggctattgtgaatagtgctgttacaaacatatgtatacatgtatttgcttgagaacctgttttcagttatcttgggtgtacacataggagtggaattgctacgccacatggtaattctgtttaactttttgaggaattggcaaactgttttccacagagctgcatcaattacattcccaccagcagtgtatgagggctcacatttctctccagattcttcaacctttgttattttctattttcctgtttattacagtcatctgggtgggtgggtgtgatatcctgtgtagttttaatttgcgtttccttggtaaataacaatgctgagtgtcttttccatgtgcttattggccatttgtattcctttttgagaaaaggtttattcagatttttccatgtttaaattgggttatttattttattattatttagttgtaagagttttagaagatatgctggatactcatcccttatcatatatataatttgcaaatactttcctcattatgtggattgtgttcatttccttgatgctattgcttgcagtgcataggtttttaatttttgatgaagtctattctttcttttctctcttgtgcttttggtgtaatatctaagaaaatattacctaactcgaggtcattaagacttacttgtatgttttctgctaggaatctttttaagaagttgacaaagaataattgtgtatatttatggggtaaaatatgatgatttaatgtatgtttgccttgttaaatgataaatcaaattaattaccatatctaccacctaatatacttattactttttgtcactagaacatttaaaatatactcttcagcaattttgaaatatacaacacaccatttgtttttttaagaggcagggtctcactctgatgcccagtctggagtgcagtggtgtgatcacagctcactgcaccctctacctctgaggctcaagtgatccttccacctcagctcccaagtagctgagaccacaggcacgcaccaccacaccatgctaattttgtttttcatagagacgatgtctcactgtgttgcccaggccggtctccaacttgtaggctcaagcaaccctcctccttggcctcccaaagtgctgggattgcaggtatgagccatcacgtccagcccacaatacactattatttattatagtcaccgtgccctgcagtggatctctaaaacctatctttcctgtctaactgtaacttcatatcatttgcttatctccctgttgcccatctgcccacaccaatcctctggtaactgcccttctctctacttctatgagttcaactcttttagattctacatacaagtgagatggtgtggtatttgtctttctgtgggttgcttattttacatttctgctaagagttttatatgttcgctcttgtatttaggtctgtgatacattttgagttaatccttgtgtatggtatgaggaagagatcctctttctgcccactcttttgtgtatgaatatacagttttcccagcaccatttgttgaaaaatcatttgttcccttacttcatagtcctagcacttttgttgaaatttgatttcaacaaatctaagggtttattttctgactgttagttttattcattgatctatatgtctatcctgtgtgtcagctcctacactgtcactatagctttgtggtaagctttgaaatcatgaagtatcaattctacaattttgttctttttcaagatcgttttagttattctcggtcctttatgtttcaatatgagttttaggatcaactgattaatttcttcagagaaggctgggtcctgtggctcatgcctgtaatcccagcacttttggaggccaaggaaggtggatggcttgatctcaggcgttaagagaccagcctgggccatatggtgagaccacatctctaccaaaaaatgcaaaaaattagccaggcatgcggtgtgcgtctgtagtcccagctacttgggaggctgaggtgggaggatcacttaagcctgtgaggcggaggttgcagtgagtcatgatcacgccactgcactccagcctgggtgacagagtgacacttgatctcacaaaagttctttgatatggattgcattgattctatagatcaatttgggatttttggcacctgaacaatattaagtcttccaatttgcgaacatggatgtatttccatttatttacatattcttaattcttttcaacaatgttttgttgtttttaatgcacaaatcttgcacctcttctgttcaatttattcataagtattttattctctttggtacgtggaattatattcctaatttcatatttagatggttttttactagtgtatacaattgctttttatatgttgatctcttttatcttacaatcctgttgaatttttctattagtctttaggtcatagtagcttccttaggtttttttttttttttctttttcttttttgagacagaatctcactctatcatgcagggtggcgtgcagtggtgtgatcatagctcaatgcagcttcgaactcctgggctcaagtaatcctcctgcctcagcttcctgagcagctagaactacaggcatgtgccaccatccctggctaatttttttatgtttttatttttatacagatggggtctcgctatgttgaccaagctggtttcaaacttctgacctcaagtgatcctccccacttggtctcccaaaatgctgggattacaggagtgagccactgtgcctagtccttaggatttttaacatacaaaatcatgtcatttgcaaatagaaatcattttactttatctttctcagtctaaattcattttatcttcttgcctaactttcatggcttgaaccgccaatgctatcttgaatagagtggtaagagtggatatacttgtcttgtccctgatattagggggaaagtattcaatctttcacaattaagtatgatgttagctatgagtttattgtagatgctctttaacaggttgaggaaactctcttctattcctagtttgttctttgtattttatcatgaaagagtgtagattttgtcaaatgctctttcagtatcatttgagagaattacgtgtctccctcctatagtctagtaaggtggtgtattatattaattgattttcatatgttgaaccaactttgcatccgtgggataaatccacttggtcatggcgtatcgttctttatatatgctgctggatttggtttgctatgttttgttgaggatttttgaacttatattcataagagatgttggtctgtagttttttttccttgtgatgtctttgtctggtttcggtatcagggtaatacaggcctcagaatagactggaaagttgtgtttggtttttttgaaaagtttgtgaatgattggtattaagccttctttaattgttttgtaaaattcaccatctgggtctggatgggcatttcccgtgtatgggtattcccctttctctgcatccttgccagcatctgttatttcttgtctttttgataaaagccattttaactgagatgaggtatcttattgtggttttgatttgcatttccctaatgtaagtaatgttgaacattttttcatatacttttttcatatacttgagtgtttgtatgtcttcttttgagaactaggtattcagatcttttgccccttttaaaatcagattctttatttttcccagcaatacaattatgtacatattgttttatgccattacttttaagaccagttaagagaagaaaggataagaaataagcaattatactgttttaataagtagttacaagttatataattgcttatataattacacaattctattttattagtgctctccagagggtgcagccttgggcatgagtgctggatcgctaactactccagataattatggttttagctgggttctttttttggggtagcttttgcctttttattacaaattatatatgtgtatatatatatatatatatatattttttttactttaagttctgggattcatgtgctgaacatgcaggtttgttacatgtgccatggtggtttgtttcacctatcaacccgtcatctaggttttaagccccgcatgcattaggtatttgtcctaatgtgctgcttcccttttcccccaagaccctgacaggcccctgggtgtgatgttcccctccctgtgtccatgtgttctcacagttcaactctcacttctgagtgagaacatgtgttgtttggttttctgttcctgtgttagtttgctgaggatgatggtttccagcttcatccatgtccctgcaaaggacaggaactcattctttttttactattttttcctgatgtttctgttaagcttctggcccgtctgcctctgttggtatcacttgcatctgttagactcctctaattgttaattgattgctcttttctttttaataggcctgtgggctgcttaatgtctaacccttttgccaagacaaagtgttgccagggtttgaggctgtctctgaccccaggaggagggcccttcttagttatctctttttctgattttctctgttaagcttctgcctggatttttgggttttgttttgttttgttttgtttttgacggagtctcgctctgtcgcccaggctggagtgcagtggcgcgatctcagctcactgcaagctctgcctcctgggttcacgccattctcctgcctcagcctcccaagtagctggaactacaggcacccaccaccacgcctggctaatttttttgtattttttttttagtagagacggggtttcactgtgcttgccaggatggtctggatctcctgacctcgtcatctgcccgcctcagcctcccaaagtgctgggattacaggcgtgagccactgcgcccagctggtctttttgtttcttgttactactgtcatggaattaccaccctcttcttggttttttagcaccagaatttcagatatttttgtacggtgttcttaggcatgaacttctccacactcttttcaagaaaagccagttttagggagacttgtggagctctctgttctgatggcctccctctcccccgggcagaaccgctgagccactggactggagctggtgtcagggacagcagctagcttctcctgcagcgatgtctttcctctacagctagaacactgggagggggtggtagctgctcctcttctcggtttgccctttcttgtgtggaacctctgccccatgagtgaactcaggcaggatcagtgaagcccagtgtgcttcacctgctaaacttggcatggaacttccatgctaggaggaggggctggatgggagaaggagccccggtgctgtaagccacaatttctaactaatatagcacatccgcaacatggagacagtaggataaaagatgctggtgcactgccctttctgaactgaaactgtagccctaggctgggagctggggagaggtggagtcccattttcttgtccgtgactacccagcatagagcttcaattacacagagttggctggggatgtggggaatagggataatttgtggcttaaatgccctcagactctcgctgctctatacagattgagtggaatttcttgaataaacatttctttatttgctgtatgcccttaggacaatttcctgagacttaactagttgtttttataaaaaaaataattttcatcagttaaatggttgttttgccgggaggaaggcacccatgctcttcacactgacttctggaagtcctgctttatagtttgaaatattttgcatttaagtctatgatccatttcaaattaattttcacattttgtgtgagataagggtcaagatacattcccccccaatatagatatctattaaaaggactaatctttgcctggtgagttgtagtggtacaattgtgataaatcactgattgtctgtgtgtggatctgtatctgaactctgtttcattccattgataaaattatttatctttcgcaataccacgctctaaattattatagttttatgaaacttcctgatctgttagggtaagtcgtataactttgtttagtttcttcaatattgtattggctatcttgtcattttcattttctggtaatttttaaaaaaaatatgtatagagtcagggtgtcactgtgttgcccaggctggtcttgaactcctgggatcaagcaatcctcttgcctcagcctcccaaagtgctaggattacaggtgtgagccaccgtgcccaaccatcactttctgataaattttagaatcactttgttaacttatacaaaaccttgctgtaatatttattgagtttgcattgaatttatcgatcaatttggggaacactgacatctttgttatattgagtcttccaaagcataaacctggtatgtttcccatttacttaggtgttctttagtatctttcagcagagttttgcagaggtttctcacctttctttagatttaattctaggtatttgttatttttgatatcattgtaaatggtaatggagaattggcttctatctagagccgtaaaacaaacctcaacaagttctaaagtattgaagtttaacagagtaagttgtctgaccataatttgatcaagctaatgactacagaaagatctccaagcacttggcagctaagcaacacaactctaaataactcatggtttaaagatgagtctcaaagatttttaaaactatatttaacttaatgaaatgaaaatacaatatatcaaaatttatggaacatatataaagcagtgctaagtgtgaaacttattgtgctaaatagttgtattagaaaaaaggaaaaatcaataatctaagctcccacatcaagaagctaggaaaaaataaaagagcaaaataaacccaaagcaagaaggaaggaaataataaagaggagagcaggagtcgataaaattgaaaacagaaaaacagtctagaaaatcaatgaaataaagagttaattctttgaaaagatcaataatcttttgatagttttagcaaaactctcaaaaattcaaagagaagacacaaattgtcagtatcaggaatgagacaggagatataggttttgcagacactaaaagaataatagtggaaaactaggaataactctacacaatttgacaacttagatgaaatggaccacccatttaaaagcacaaatgatcacaacacacccaatatgaaatacatcattttagtagccttataactattaaggaaatagaattcagaatttaaaatatctcctaaaaaggaaatctccaagcccagatggttgcacctgagaatctaacaaatgtttaaaaagaaattgacaccaattctgcacaatctcatccagagaatagaataggagggaattcaattcatttcataaaatcagagttattttgctactaaaatcataaaaagacaaacaagaacaatgacaacaacaaagcaatgaaactatagaccaatatccttcatgcaaaaatccttgacaaaatatttgtaaattaaattcagcaatataaaaaaatacttacacatcatgcctatgtagggcttattccagaatgtaagcctggcagaatatttcaaaaatcactctcagtgtaatccatcatattaacatgctaaagaagaaaaatgacatgatcacatcaattgatgctgaaaaagcatctgataaaatttaacacccattcgtgattttaaaaactcccagaaaaacaggaatagggggaatttcctcaactcgataaagtccatctacaaaaaccctacaactaatataataagtaatggtgaaaaagtgaatgctttccacctaagactgagcaaaggagaggaagtctgctttcaccattcttattcagtgtattgctggacattctaaccagggcaataagtcaaggaaaaaaagaattacaatttatacagattggaaaggaagcaataaaactgttcctatatttgtaggccacacaactgtctatgtaaacagtcccaaggaatctaaaaatgtactcctataactaataagtgagtttagcaaggtttcagaatgcaagatcaacatagaaaaaatcaatcgtgtttctttataccaataatgaacatgtggacattgaaattaataacaaaatagcacctgcaattgttcaaaaatgaaaaagttaggtgtaaatctaacaaaacatgtacaggacttatatgctgaaaattacaaaatgctcctgaaagaaataaatggagagacatgccattttcatggattgtaaaactcaactagtaaagatgttagttccccccaaattgattgcaatttatattttattttattttgagacagagtgtcactctgtcacctagacaggagtgcagtggcgcgatcttggctcactgcaaacctccgcctcccgggttcaagtgattctcctgcctcaggccccctagtagctgggattacaggtgcgcactaccatgcctggctaatttttttgtatttttagtagagatggggtttcaccctgttagccaggacggtcttgatctcctgacctcgtgatccacccaccttggcctcccaaagtgctaggattacaggtgtgagccaccacgcccggcctgattgcaatttctatcaaaatcccagcaagattttatttttgggggggcgggtgggtatagacaagattctatatttatatggaaaggcagaggaactagaatagctaaaacagttttgacacttgtaccttttcttgttaatttcatgtacaacttttcttgaataaccaagctggcaggtgaggctcatcaagaatatccagattcttgatcttcttaggctttgtaaaggaggccaatacccttcaacgtgcatgggaggctaagaatggagcttgggagagaagagccctccctaaggttactgatgcggtcaggatgattaggagtaagggctcccccacaagttgtggcagcaggtgggggatggagtgtcagatcagttgtcatcactgagggctggcttccttactgcccgggtcctgccagatctgctgccttcctcataggcattggtttaccttgtgattttgtttatctgggctgcactctcaggtgctgtatcacatatcatctgccacttactattattactattattacaatctgcactctagaaccacatgccctttggatcctcacaacaactccatgaaaaaatcgcagctgtcactcttctctggttctcttttggagtttatggtgcctgtgcacttctgctagatcacgtgaaaactgtggatatgactccaaatagttctccagggagtaaacaaagtggtttggggcatcatcttttgaaacttctaaggatacagtgcctgggaaatatagaattagaaggtgtttagtagaagggggattaaaatagatgggaagagccaccttctctagtttcatgttcattggtaatggccggtggtactggaggccatgagcttcctcaagccacaacatggagtaggacttggctgcattcactctctgatatggagtagcccaggagaggaaaaaggttatagtataaggggaacatttttcatttgcaagtacagaagacaaaaacgaacacccttcctcttattttgctcacataatctcattgtcacctgcctgtacatgctttcaaaagctgcctgtacatgttttcacctgcctgtacatgctttcaaccatggaatatttgaacttggatcactatgttagtcaggtgattgcatccataaaaaaaccttcatattccatcatttttttccatttcctttatctctcaaccttcacccacagtcatggtgtcagaaactgcaaaacaaatgaggagagccccaaattttagacctactgtccgtctctacagaaaatagaaaattacctgggcatggtggcacatgtctgtagtctcacctactcaggaagctgaagtgagaggatcgtttgagccctggagttcaaggctgcagtgagtcaagatggcaccactgcactccagtctgggtgacagagtaagaccctgtctcaaaaaacaaaaagcaaacaaacaaaaaaagacctactcaagcccaatcctatctccaagacaatcctgcaccccagttctccacttgccaatcttactcagcttccttcctccttccttatcaccttaatcttaaccatggttaatctttaacagctgctccctcctttttccaactggtaaacttcagcatattcttagaatcataaacgaagatattccaagagttttccctgcattctctttcctagaagggtccatgcttctctggccctgctgtctggactcttaactgtgtcagttagatcctatgcaaagatagttccaaacccaagcctttagagctaatctggaactaagccttccccaccctggcctgccctccctgagatcaacctagtggccacacttccagccccatccttaacctcctttctttctctcccagctcctgcttatgtgtcagtctgtctcctcctcttgtgtccaagggaagtcatcggtgagtacaaggatgggcaagagtgaagaggaaggaggctgactttggaaagtgggcatgggggttcacagagggctcctgattgggggatgtagtgcctggttatccttgagctcacaccaacaatgtctgtccatctgtccagctcccgctggctcagaaccatggctgtgccagccggcacccaggtgtggagacaagatctacaaccccttggagcagtgctgttacaatgacgccatcgtgtccctgagcgagacccgccaatgtggtcccccctgcaccttctggccctgctttgagctctgctgtcttgattcctttggcctcacaaacgattttgttgtgaagctgaaggttcagggtgtgaattcccagtgccactcatctcccatctccagtaaatgtgaaaggtagggaccccgtccctggccagggggtcgggggaagggaggtggaaatgaggaggggagtctagatgtcttcatcactccttttgaagagccctggccctgtagtctaatctctagcagtttctcaaatattttcagttatctccttgtctgttattcgtaatttcttggtttctttttctctgtagcagaagacgttttccctgagaagacatagaaagaaaatcaactttcactaaggcatctcagaaacataggctaaggtaatatgtgtaccagtagagaagcctgaggaatttacaaaatgatgcagctccaagccattgtatggcccatgtgggagactgatgggacatggagaatgacagtagattatcaggaaataaataaagtggtttttccaatgtacacacctgtacccaatgtcgtctcctttcttttttttttttttttttggattgaaataggcaaggaagactattcaagactattgcaatggaggaaagagattgaactcagttctgctgaaacaaaaggctggagagtttttaagtacactattattgtgtgggagtctaagtctctttgaaggtctttaagagtttcctctattaatctatgtgcttctctgttggttgcaaatatatttaggataattaggtcttcttgttgaattgaaccctttaccattatgtgatgcccttctttttttatcttcattggtttaatgtctttgtctgaaattaggattgcaactcctgcttttttctgttttccatttgcttagtagattttcctccattcctttattttgagcctatgagtgccattaagtgtgagatgggcttcttgaagacagcataccattgggtcttgcttttttatccagcttactagtctgtgtcttttaagtgaggcctttagcctgtttacattaaaggttagtattgatatatgtggatttgatcctgtcattgtgctgttagctggttattatgttggcttgtttgtgtggttgctttatagtgacactggtctgtgtgtttaagtgtgtttttgtattagctggttgtggtctttccttctatatttagtgctccttgcaaaatctcttgtaaggcagagctggtcgtaatgaattccctcaacatttgcttatctgaaaaggatcttaggaagcatagtttggctggatataaaattcttggttgaagactttttctttgagaatgttgaatatagatccccaatctcttctggcttgtgctgagaagtctgctgttagcctgatggggttctctttgtaggtgacctgccttttcgctctaggtgcctttaacattctttctttcatttcaaccttggaaaatctgatgattatgtgtcttggggatgatctccttgtgtagaatcttgcaagagttctctgtatttcctgaatttgtgtgttggcttctctagcaaggttgagaaagttttcatggacaatatcctgaagtatgttttccaagttgtttgctttctccctctccctttcagggatgccagtgattcataaatttagcctgtttacataatcccatacttcttggaggtttggtcatttctttttattttttatttttctttatttttgtctgactctcttatttcaaagaaccagtcttcaagttctgagattctttcctcagcttggtttattctactgttaatacttgtgattgcattgtgaaattcttgtgttgtgttattcagctctgccagacctgttaggttcttttttataccagctattttgtcctttggttcttgtatcactttattgtgactcttgttttccttggattgggttttgccatcctcctgaatttcagtgatctttgtttctatctgtattctgaattctacttctgtcatttcagctagttcagcatggttcataactcttgttgcagaactagtgtggtcgtttggaggacatatgaccctctggccatttgagttactggagttcttgcattgcttctttctcatctctgtgtgtgagtgtttctttaaccacagtgtagattaagtacagtcaatagacttcttttctggatgttttccctgggctgaggctttgtgtggggtctttatttgaaactgacttcttgtctctggtttcagaggccggatatgttagtaaggtattatttatgttgacgctttggggtgtgatccagcaggtggcacttaggcttattggtcagttgtatggctcccctatgtttcctcacagttgcagctgtgttttctcacaatgctctgaaagtgtgggttcctctccctcttgagtgctggctgtgattatgacttgggactcctgggctgcccactgcagctctggggtgatctcagtgtttatgttccttcctcaagttggaagcagcagaggaagggatcttattagtggttgtggccaagggttgtttgcttgtctcctgggggctccattccagagagatgaaggtcagcagccactcagtgcagtcagctcaaggtggagcatctgtgccgtgggtccatgccaggggttccctgcctggtgatgagcagtgggagagggagtatgggacccatgggaaacagactgatctcctctccttgggttgactgcagcttgttggaggtgtgaataaagcgcttagggcctttgctcctttgttagtctgagggtggcaaggacagttccactgcagaggcagtggcagaggggctttcagatggcgctggaggctctgttcatggagttgctgagttgctactggcttcatagctctggcagggggtggctggaggcctaggcttggagaatctgcctgatgaggagacatgggaatgggcaccaatgtaacagtctgtcctcttttctgtagggctgctgtggtattctgggggcctgctccagtccttagttgcctcagatagtccagtacctggaggtatcaccagtgaagactgtgaaacagcaaaaatagcagcagtccctccctgaagcttcatcccaggatggtacaggcttgttgccaatgcaaaggcacctgtaggaggtggctgaagaccccatttgggaggtcctgcccagtgaggaggaatgggatcagggacctgcttaaagaaacagtctggccatgttttggtagagcagctgtgctgtgctgggggtccatgtcagcccctggttcctcagatactctgaggcctgaaggctggaacagctaagtcatctaaatggcaaagatagtggcccgtctctccctctgggagctctgtcccagggtggttacaaatctctgtaggatggagaacacaaacaggggtgactgtaggtcctggttgggacattccacccagtgaggaggaacgggatcagggacccatttaaagaagaagtctgaccaccttttggtggagcagctgtgctgtgctgggggacctcttctgcccccagtcagctcagactctccaatacccaaaggctgaaacagctaagtcacccaaacagcaaagatggcagcccacccctccctctgggggttccatcccagggagaattcaaacctctgtcagctggagaacatcagcaggggtggctggaggccccagttgatcacctgcttcctgatgaggataggagaagcacttggtacataccattttatcaatttagccagtgtcttctgcagcatccccatttcctcagagggtcaagaccaatttacagtcacctggtaaaggagaacaatagacctttacgtcttgcgtgagggatatttacataaccttatagtggctgctgacctgagtagatggagtgcgctggagaaggcacgtgttttccattacattgatgatatcactaacttctgagtcttttttcagcttacaaactgcaggccccaccttgctgtctcacttcgtgaacagaggatgggtggtcaatgtagacaaagttcagggtccaggcttatcaaatacttgagtgtcgtctggtcaggtaagactaaagttgttccatctgtcattatagatatggtgtaggcctaactgtgtcctaccacaccaaagcagttgcagaccttcttaggccttctagggtattggtgtctttttattccccatgtggcccaacttgttaggcccttgtactgcttagtcaagaaaggggcccactgggactggtccacaaaggaggatgatgcctttggacaagctaaactcacagtgaagtgaatacaaaccttgggtgttctagggcagggacggccttgtaaatttgacgtagccagttactccaagaggttagggcgcagcctgtggcaaaggtgaggacacagatatgtgcctgtagtattccggtcccaactatggaagggtgctgaagttatctgtagaatcatggatcaacaatgctacactacatatcatgccttacagcaaagggaggatgttacaaagggggtcccattctagtctgcagccagcaccccatagcaggttggctgaaggacaccttccagaaaccaaagtctgggaatgcccagacacagagtgtggccaaatagcatgcatgcttgcacagaggagcacattaactagcacagggagcacattaactagcacagggctccatttggtgcgtggccctgtcacctacatgacagctgaaggagggcctttgacacagacactgagcctccgcaaattacctcctcatgcaagagggacagggcccgatttctgaccaggcctggtacagaggtggcttgtcacgaggcaatgcctgcacttggatagccatggtcatccagccatccactgatagtatctggcttgatacaggcaaaggacataatagccaatgggctgagctgtgagccgcctgggttgtctcttctgtgagccggacccaatagtcctgtgcatcaatagctggtccatctttaagggacttaccatgtggctactacagtgggaaacactggattggatggtagctggccgccccctttggggaggctgacatgtggaaggacattctccattgtatctcggacatgcatataatggcctagcatgtggatgcctgcacagcacctgcaccacctggaaatcagcaggtggactagctatcccacattcatctactggaggaagttctgtttctaacttccaaaaaggtgttagaaacagaagatgtggcccactggctaacaaagaggacattaagaacaagatacctatcgggggacctgccccgataatcacataggttcttttctattttcctaagcgtcagctggcttgagaaataaagggacagagtacgaaagagagaaattttaaagctgggcgtctgggcgagacatcacacattggtaggatccttgatgccccacaagccacaaaaaccagcaagtttttattagggattttcaaaagggaagggagtgtatgaataggtgtgggtgacagacatcaagtatttaacagggtaatagaatatcacaaggcaagtggaggcagggcgagatcacagggccacaggactgaggcgaaattaaaattgctaatgaagttttaggcaccactgtcattgataacatcttatcaggagacagggttttgagatcaaccggtctgaccaaaatttattaggcgggaatttcctcttcctaataagcctgggagcgctatgggagactggagtttatttcatctctgcaatctcgaccataagagacaggtacgccccggaggggtggccagttcagagacgtacccctaggtgcgcattctctttctcagggacgttccatgctgagaaaaagaattcagcgatatttctcccatttgcttttgaaagaagagaaatatggctctgttctgcctggctcaccggcggtcagagtttaaggttatctctcttattcgctgaataattgctgttatcctgttcttttttcagggtgcccacatttcatattgctcaaacacacatgctttacaatttttgtagttaacacaattattacagggtcctggaatgatatacatcctcctcaactgacaggattaagagattaaagtaaagacaggcataggaaatcacaagggtattgattggggaagtggtaagtgtccatgaaatctttacaatttatgtttagagattgcagtgaagataggcattagaaattacagaagtattaatttggggaactaataaatgtccctaaaatcttcacaatccacgttcttctgtcatggcttcagccgttccctccgtttggggtccctgacttcccgcaacaggtaccctttgggccacagtgaagaactggtgcccaccactatgacataaagacatagtacacatctgtcaataatgtcctgcgtgtgtgcaggagagccgcagccccttgctgcatgatactgggcagatcagccagggtcggagcctggctccgtggtggcaggtagactatataggacctttgcccgtatctgatggctgctgctatgccttgacttgtgcagacccctacaatggggctaatgcaggcatatcccagcaagcgtgccacccagaaaaccaccataaaaagactagagcagctgtgtgcaacatatggcatccccttccgatatggacggggaccagggctcacactttactggacaaaaatacattatctattatggactgaatgtttatgtcttccccaaaatttgtatgttgaagccctgaaacccactgtagctgtaattgaatgtggagcctctaaggaagtgcttgaggtcataagggtagggccctgatctgataggattggtgtccttataagaagagccaccagagagcttgtactctccctgcacacacaaaagaagaggccatgtcagcacacagtgagagggcggctgtctgcaggccagaaagagagccctcaacagaaacggcattgaccagcaccttgatcttagacttccaacctccagagtgtgagaaaattaacttctgttgtttaagccacccagtctgtggtattttgttatggcagcctaagtgtcctactatgatatcttaatatgtattatctagaaggaggaaaggctaaaacaaagtcaaagccgtgaataccgaggactacgggcacataccaccatgccagctaatttttgtatttttttagagactaggtctcgctgtgttgcccatcttggtctcaaactcctggcctcaaatgattctcttgcctgggcctcccaaagcactgagattacaggcatgagctgccaatacccagacaaggattacatgattgttttgaaaaacattatcgttggttaaaaagattaataacaagggtggcatcagttttgagtttggacaggcagttgctgggcaaatgtctggtcttatttaaagcatttcactcttatgtttttgagaaaagaacttttatctaaggaatgaaaatattttcaattttcaggcccagagaggcattaaaatgagacatccaatcatgtcatactcctccctttgagctatatcttcatctctggaaactgcttgctattgccacaagtagctataaattaacctaataatgccacacctgacactataacccacaccctataacttaataatatgtagccagtcactaaccagtgccatttctgtaaacccatgaaaactgacaaacaactttgtatcaaccccactgcttgtccccctttttttgcctttaaacatccacttgtaactgctgctaagcagagtgtgcattcagtgcaacttgcatccatgatcccaggttgcagttctcaagcttggcccaaataaagttctacttatataattttgcttcagcttcttcctttaaggttggcatatcctacatgctgtaatttttttccctgtttttttctgtacttattttttcctgaatagatcagtagattgagtgtgtgtgtgtgtgtatgtgtgtgtgtgtgtgtgtgtgtatgtgtatgtgtaccttttttctccactaagattatttggaaactatgtgtttgtttgcccactggttgctatatccaacatagtgggaccctagctccacaaatttttcttttttaattagccaggtctggtggcatgtacctgtagtcctagcttctcagaaggctgaggctgaaagatcacttgagccaggaggtcaaggctgcagtgagctatgattgcaccagtgcactccagtctgggcaacagagcatgactctatctctaaaaaataaaataaattaaaaatgttttcagaaatctttaagaccttaaaaatagaattgcccaatccaatataaattgaatttcagtggactaaattaggtgaatcaacctgaagacagtagaaatatcaagattgtttcaattgaatgcagtgatagagaaagaacaatgaccataaaaatacaaagtaaaataaaggccatacactctaaagcaaaaataatgccactcaaaagaagaaagtggagagagagagtgaatagatgttttcaaggtggataaataaataaatctgtattggtgatagtgttggagacctaatgagaacaaaactaggagtaattgtatgagaatatgggtgagcaaagaataatgcctttatttaaataaagtactttgggaggccaaggtgggcggatcacctgaggtcaggagttcaaaaccaccctggccaacaaggagaaaccctgtctctactaaaaatacaaaaatcaaccaggtgtggtggtgggtgcctgtaatcccagctactcagaaggctgaggcaggagaattgcttgaacccgggagtcagaggttacagtgagctgagatcatgccattgcactgcagtctaggcaacagagtgagactctgtctcaaaaaaaaaaaaaaaaaaaaatggagataacaccctagaattgccagaatttaatcttttcaagtatttgtatgatttgctttcaaataaatggtacctagtgagatctttgctaatgtcctgcaagaaacattccaaattgatctcagattttctgcccaagtagtagaaattgaatgactagctcagtttctgaacattctgggtggctagaagggggatgcaagggctccatggcaccatatgggagatatgaaaaataaaatagggatagctaaatgacatgtccagggtagcttactaagtgggtgcaccgagagagagtaagaatcgggctctcaagcttgagactcactgtgttggtgtcactcactgttgtgtatcagtgattgttgtgggaagtcagggaacccgaatggagggacctgctgaagccgtaacagaagaacataaattgtgaagatttcatggacatttatcacttccccaatcaatactcttataatttcctatgcctatctttaatctcttaatcccatcatcttcataagctgaggatgtatgctgcctcaggaccctgtgatgattgcattaactgcacaaattgttcgtaaagcatgtgtgtttgaacagtttgaaatctgggcaccttaagaacaggataacagtgattttcagggaacaagggagataaccttaaagtctggctgcctgtgggctgggcaggacagagccatatttctcttattacggaaaacaggtaagagaaatattgctgaattcttttcccagtaaggaatattaataattaacagccctgggaaaataatgccttcccaggggggcctctaaaatggccactctgggggtgtctgccttatgcagttgcagataagggatgaaacatgctctggcctcctgcagcacccccaggcttgctaggattaggaaattccagcctggcgaattctagtcagaccagttctctgctcttgaaccctgttaagatgtttatcaatgacaatgtgtgcacggcgggacatgaaacttcattagtgattttagtttcaccctgaccttgtgatctcgccctgaccttctgcccttgtgatcttttgtcgcccttgaagcatgtgatctctgtgacccacaccctattcgtacactccttcccctttgaaaattgctaataaaaccctatttgtacactccctcccctttgaaaattgctaataaaaacttgctggttttatggctcagggggcatcatggaacctgccgacctgtgatgtcttccccagacaccaagctttaccatttctttcttttgtactctttcgctttatttctcagactggccgacacttagggaaaacagaaaagaacctacgttgaattatcgggggctgcttcccccgataagtgatagcctgaatgagtcactttctgggtcaagagccaggagctaagtcaaggggagtcagccagagggaggtgctattcaagacgagattatgggtggggttcagattgacagagagaagaagctattgggcaagagtggtgacttgctcactcagatgagttcgaagataatctctactgataaaacaatcaaacttagaccataccattcatggaatgacatggagatgcacatttcagagtattgtgtcttatttttctctatctccattttctgtcagggcaaattaactctgagtacaatttacaactgccttctcttccttggactcagcatagctctcagcagtctcctgtcttatagggacagcctgctgtttctcatattccataggtctagtctattgttgacttacccaacctctcaaggagaaaatgcgagtacacttactttatcttttgataactcccttcttgaactccccatcagtatgaagctcaccctgttgaatggcctagatggaggatattacaaggaaccaaaaggacattcaggaaaagtgagaattttttttaccaagtgataagttttataagaatgaaaagtgggtgccgtacaggtaaaattggtgcaaataatatattgttacaccaaaaggaatttgaagctctgaagaactttcaccaggaatctgaattgcaaaaaaaaaattatgtgtgatgaagattaatgatagaaacatccctaattcaaaaggtcttatttttgctttggattaagcatgcaaaaatctggagtagtccttggcaggaagtgttcttgctgttgactccagagatacggactttggaagtggaagccattaacctggatgtaactgaatggttatatagtctaaggtagaagaaatcgtgtaaagcctgatagtaaaaagtggcaaattgtcctgattatcaaggggggaattgggtagttactacacaatcggcagaagagagtataactataccactcacacaaggcattctgtgggatgcctcttagaactcccacgtcccattgtaaaacatgggaaaatgataataatccattacaggaaggactcctgagggaatgtatacttcatgaagacgtgagtaacttcaccaggttaaaaaatcacagccagttgaggtgtttgctgagagcatagggattatggaatggatagtggaagaaattttttttcaggtggagttctgttacgttccccaggctggtcttgaactccggaactcaaatgagcctcccacctcagccacctgagtagctgggattacaggcatgtgccactgtgtctaacttgaaagaggaaatttttaaatgccagctttagcctcaaggccagctgctgaaacaaggactaagttagatatttatataatcttcctcactttgatgtgtatatatatatattttttttcagacaaggtctcgctctgtcatgtagactggagtgcagtggtgcgatcttggctcactgtaaccttcactttccaggttcatgcaatcctaccacctcagccctctgagtagctctacagacatgtgccaccatgcccagctgatgtgaatatagtttctgtattaactgagtcctctgctttttgtctcagtgccttcatacccctctatgtaatataggtttatattggttgatccttggtatttatagcatgaaagagcaaaaggggttgttagtcatctgggagacggactagcattttcaaatatctcttccatagagaagattaaaggtctttgggttgtaaaatgaatagttgcatcacattaggtggaaaatagtattgttgctgcttttatttggaagttgaaaatgtctacagatgcttatttttgaatggggtggactgtgctagactttctgttgtcaacgtgtccccaacaccactgttccttctgaagtgggaaccacgttttccagaatcacttcccctatatggagcccagaaggtgaattgtatgatgtggaaaattcaggaataacaagcactatcgtatcctcatgtgattcacgttctgacccattataaagcagactacctctgttggtccatttccattgctataaatgaatacctgaggcttggcaatttataaggaaaagagatttaattggctcacggttttataagctgtacaggaagcatggtgccagcatctgattctggtgagggccttgggaagcttacaatatggcagaaggcaaaggaggagcagtcacgtcacatggcaagacagagaacaggagagatgtcagactcaagtcaccagctcttgcacaaagtaacagggtgagaactcacttattactgtgaggagggcaccaagacatttgtgaggaatctcctcccatgaccaaaacacctccccaggcctcacctccaacattggggatcacactttaacatgagagttggaggggacacacatccaaactgtatcacagacaagggcaggaaattgtaaactttcataaccagagctagattgtgccccaaccacagatgctgtgccagatgttgtgtctttattggggcaaatcaaaacagagtttggtacttggtatgcaattattgatctggcagttgtgttcttaccaaaaccctgcagcctcaagtgtgtctgggcaaagatggagctggggtaaagtcctttggactgggtatgagcccatggacgagaacatgcatatggagtcaagtcctgggaaggccacctagaggagggagcagaaacaggacagatgagcaggtagcacccctgcctgcctgggctgagaaaggacttagcactggcgaatacagacccaccttttcctcacccagaaaagcacaagtgagctatcacaggacctggagtcgaggtaggaccgaccacagaattttcagggctcagtgcaaagtgaacatgcagcgctgcttgttcaatatgtgttttggatttcaacacagtgacagcagagcataaaaccaacaccgggcccttgtaagtgcaggggacccgcccttgtggctggctctggagatccacatcctgagatctgacacgagattacaattatgtaagaactcttcctccctgtttttccagaacaaaaactacatagagggaggaggaataaaatatcaggtgggaaagaaagaagtggctggtaacaccctcagcatagctgaaagtttcccaatcatggaaaaactggatgttggtgggaaaacattgaggactcgtcctcaattttccctagtgacaagtaaaggcacctccatataataaatgtatgaggagtgggtagggcaataggaaagacgtttccccagtgctcctcacacttgatatcctctgacatttatgcttctaaccctggggttgggagctgtcaaaaatgcagcccagtctctcagaccctctttggaactggcaggtgactccaaccaaattcccagattaactctctaaattcccatcctcttctggaatgtggctcggtaattgctcattactttgttaggtcattgatgcttttaagatgtttttgtattttgttcagcttcttttattgtctttagcaaaaggattgatccaaattaccaggtctgatattactacaaaccaagaccaattatctgaattttaaaatctttaaagcttgcttgtcaagaatctgggtgttcaaatattgtgatatttgaagtctgagaagtacaagaatgatagaagagtttttaaaaattagtaaattattaataacttggtctatatattcctcccagagaagtaatatattaatacatgaatctgtctctgaaaactaataatgtctaacacttatcgagcacataatatatccaaaatattaccctaattttcttatatgtattaccttattttattctcccagcacatttatctgttaatactaattcctatttcaaacttacagataataaaattgaataattcacagtgaggttaagcagctgactcaggactacaaagatagtaagaatcagaatcagcatttgaacccaaagtatctaactgtagagcccaggttcttaaacatcactctacaatgcctccatgcagggcagggaatagagttgaatgagagaggtatacatctctggtgcaaaatttaagagggtgtcaaaaaatgagtaaggtaatactttgtgccaaaaaatgaataagataagtaatactttgtgcaatttttttttttagacagtctcgctgtgtcacccagactggagtgcaatggcatgatctctactcagctgcaacctctgcctcccaggttcaagtgattctcctgcctcagcctcccgagcagctgggattacaggcgcccgccaccacacctggctaatttttttgtatttttagtagagacggggtttcaccattttggccaggctggtctcgaactcctgacctcaagtgatcctcctgcctcagcctcccaaagtgctgggattacaagcatgagccaccgtgcctggcactatttttttttttttttttgaaacggagtctcgctctgtcacccaggctggagttcagtggcacaatctcggctcactgcaacctccacctccctggttcaagcgattgtcctgccttagcctcctgagtagctgggattacaggtgcatgccactacgcccgactaattttttttttttttttttttttttgagtggagacggggtttcaccacgttggtcaggctggtcttgaactcctgacctcgtgatctgcccgcctcggcctcctaaagtcctgggattacaggcgtgagccaccgttcccagcccagcactatttttaaaaatcaaaattaatgccaaaaaaaaaaaaagaaaagaaaactggagaaggatccaattggatgactagatgcaggtagtatgtgcctcttccacagagaggaacaaaaacaggaagtagatattcacattttgaatatattgtttaggagagaattctagcattgaccaggcaagagacaggaaacagcagaagtaagtaacaagagggtttgaggccactcgcccacttggggacacactgagagctggagatgctctaggatgcaggaaaacagtgagagagaaacccgcagggatccaaaatgagcttttataatcttgactctgggagaaaccctcaaccactaaggccacaggcctgacatacagagctgcctaaagattgcacagggccattgctgcagaaagggagccctcacagaagcccacaggcatctgaacctggaataacctcaactgggagccatttgagagcccagatgccagggatctacacatgtgggtgctgctcctagggggaagtggggatcctaggggctgtcattcacccctgggagggtccctgccaccctgcagcaggctgctgttgagactgcgatgtgaccggaccacactccccccagcctgttgcccatgctgcttgcctgagatgcgccccatcctctctggtccaaggctgaaagcaccattttcagtttatcactgggctgcaccccacattcaggccaagttggaggcaatgtgactgaatctattgcccagttgggagaagaaaaggggagtccaagctcttctaagcacacgcattaccctacccactgcccttatcactttatgtggttccagatatcttgaaggttttgctcattcttcaatcttttttagcccttaattttgtttgactggattgtttcaaaagatctgtcctctactaaaaaaaaaaaatagctgggcatggtggtgcaaacctgtagttacagctactcgggaggctggggtggcaggattgcttgaggtggagttcgagaccagcctggccaacatggtgaaaccctgtctctactgaaaatacaaaaattagcggtgtggtggtgggcacctataatcccagctaatggggaggctgaggtgggaggatcacttgagcctgggaggcagaggttgtagtgagctgagatcgtaccactaccctccagcttggatgatagagtgagactccgtctcaaaacaatatacagatagtttacttaatcctttatcaaatgtgtactgaactaggaatcaggcaatgtaatatatatatacatatatatatacgcattatatataaaatactccacataagaataaaaaaagatgtaattatgcacatcaggccatcaaagaatgagaaagaatgagaaaactcttggggacatggtccaaggtagtcaagagccccaacattttagggtccagggacccttccaaatccctttggagagtcctcctacccctcactccctgctgtcctgtgattccacccccacctggacacaggagggtgaggatggaggctgcagctgggggagatgaggggcactgcagatgggctgggagatgcagtggggcagtgagagaccaggaggagctctaaaccaaaaataaaatcttcagctccccagccaactggacagagcctctcttggccaaggtgacccaagagaaatctgaaaaactaaattccaggccatgatgggaagggaggtcagacaccccttgtgttcaatcccttccctcttggagtttaggcacaactggccatcattaacattaaaatagagagcgtggccgggtgcggtggttcacgcctgtaatcccagcactttgagaggccgaggcgggtggatcatgaggtcaggagttcgagaccagcctgaccaacatgatgaaaccctgtctctactaaaaataaaaaaattagtcgggcatggtggcgcatgcctgtaatcccagctactcaggaggctgaggcaggagaatcacttgaacccaggaggcggaggttgcagtgagccaagatcgtgccactgcactccagcctgggcaacagagcaagactctgcctcaaaaagaaaaaaaaaatagagatcgtaaggctaacacaacagactctgtgacaataagataccaaatttcaacctgactgtcttataacatcacactacagatagccagccctgaaggaaatcaaaatattttgccccaaaatataattctttgacatattttaaaatggccctacaaagccatttttttatgggagaaatttacaactgtacagaatctccttcccattctaggtctttcccagatctaggagagattaaatgagagtctgacaccttttaggtctaaaaagaaacatttatcatctattctctctgaagcctgctaccttgagatttcatctacataaaaagaaccttggtttccacaacttcccttatctgaacgcaagcattactttctactgacttcaagtctttagagatagcttagctctttcaaccaatcagaaaatctttgaatccacccataagcccccacttcaaaatgccctgcattttcaggctgaaccaatgtataccttacgtgtattgatttatgtctttgcctgtagcttctgtctccctaaaatatataaaaccaagctgtaacctgaccaactcaggcacactttctcagaacttcctcgactctgttccccagactgtggtcactcacattggctcagaataaacctctttaaatattttacagagtttggttttttcatcaacacagtgagtagagcagagagaagaggcagagagagaagaccagggtgggagagacgaggataggtgaggagaggaggagaaagaggcagggctgcaggggtccgggcagatctggttgtggggtggggggtctgtgagaggcagggatgcaggggtctgggcagaactagttgtggggtgcagagtctgtgagaggcaggactgcagggtgagctctgagcagagctggtcatggggtggggagtctgtgagaggcaggggtgcaggagtctgagcagagctggttgtggggtgcggggtctgtgagaggcagggctgcagaggtgcaggtgtctgagcagagctggtcatagggtggggggggtctgtgagaggcaggggtgcaggagtctgagcagagctggttgtggtgtgcagggtctgtgagaggcaggggtttgcaggaggggaaggatctgagcagcctgacttgggctcgggtggggtcctccttacttgacgtgcagctgctggtctccactctgctcagtcaggcttcacatcgggtctgatgaatccgagcacagcaggaaagagggtagaatggaagagcatttatgaggatgggtggatcgtttactgaacagtggcatctcaggacaaacattgctgttgggctgggctcagtggctcatgcctataatcccagccctttgggaggccacgaggggaggtcaggagttcaagaccagcttgaccaacgtgatgaaactccatctctgctgaaaacacaaaaattagccgggagtgttggtgcatgcctgtaatcccacctactcggggggctgaggcataagaattgcttgatcccgggaggtggaggttgcagtgagctgagattgtgccactgcactccagcctgggcgacagagtgagactctgtctcaaaaaaagcaaaaacaaaaaaacattgctattggttgggggtggcagagattatagagattcccccagggttttccctcttgttggtaacacctcaccatctctccagaagacaaatacacgcatctgtgatgtatatattcatatatgagaaacaggaatgctgcaatggagtttcgtattcagactagccctaactccatcttgattgagagccaagaaaacacctgctttactgaggcactggtattttgatgatatttttcttttttttttttttctgagacagagtctccctctgttgcgcaggctggagtgcagtggcacgatctcagctcactgcaacctccacctcccgagttcaagcaattctcctgccacagcctcacgagtagctggaactacaggcacctgccactatactcggctaatttttgtgtttttagtagagacagggtttctccatattgaccaggctggtctcgaactcctgaccttgtgatccgcctgccttggcctcccaaagtgctgagattacaagcgtgagccaccgcgcccagcagtattttgataattttaaaatagccttttatatttactacatttgtattagtcaaggttctctagaggacacaactaataggatatatgtatatatgaaagggagtttattaaggagaattgactcacatgactgtaaggtgaagtcccacaataggcatctgcaagctgaggagcaaggaagccagcagtggctcagtctgagtcccaaaacctgaaaaatatgacagtgaagctgacggtgcaggcttcagtctgtggcggaagccctgagagcacctggcaaaccactggtgtaagtccaagggtccaaaagtcaaagaacctgaagtcttgatgttcaagagcagggaagcatccagcacagaagaaagatgaaggcctggacgactcagcaagttgactcattccgttttctttggcctacttttcctagctgggctggcagccgattggatggtgcccccccagattgagggtgggtctgctgctcccagtgcactgactcagatgtgaatctcctctggcaatgccctctcagacacacctagcaacaatattttgcattcttgtattcaatcaagttgatacttaatatttgccatcccaacattgaaacctcctttgcagaattataagtaaggagagaaatcaaacatgactgactccatcttgcttccagcctcactgctacatttggttgtgtgttgtgtgttttctgttttatttatttatttatttatttatttcttattccagcacagagaccaagataactatgagaggaatttaacttatagttcaacttgcagacaagggaaactgaccctccttcttgtccagagattgaagccacattcataaggtgagtttaaaattatggaaggggacttgaattttgctaaagaataggcgtggtcaaacaatgacctgccatcacttaacttgtttttctataagttgcttcctgccccagagtcacataacagggggttgcaagatttataacttccccaactacctctgtagatcacatcactattgtgaaacctaaagcactgatctttgagagagttttcagatttagcacttcggcagacccagggctgccgcctggtcctgacactccctcccaggaactgactcagctgcgtaaagacagctttagacgtccctgtgatgtcatcaactgtttcagtttcccagctccctgcctgtcaaaggatccttaaaaagccctggcccccaaattcttggagagacgggtttgaggagtttctctctgttttccttgcttggctagccatgaaataacaaaagtctttgcaacaatactggttgttctcagtatatttggctctctgggcagtgggcaaggtgaacttgtaggattgttacaacctgattaccttcccagtacctctcctttctccctccagatctggtctccagtcagacatcattttctttcattaggaagaactttctttttagcatctcctataatacatgttcactggcaacaatttccctgaacttttgtgtgcataaaaatatactcattttatatcattatttttgaatggtattttcagtggataaagaattctggaccaggcgcagtggctcacacctgtaatcccaacactttgagaggccgaggtgggcagatcacaaggtcaggagttcgagatgagcctggccaacatagtgaaaccccgtctctactaaaaatacaaaaattagccgggcttggtggtgcatgcctgtagtcccagctaccaggaagcctgtggcaggagaattgcttgaacctggaaggcagaggttgtggtgagccaagatcgcaccactgcactccagcctgggcaacagagaaagactttgcctaaaaaaaaaaaaaaaaaaaaaaaaattctggatgcccagaacattttttctctcacaatttgcttgtgtttttttagtgcattcttaattactgtttatattgagatcttaacataatttctatttgctaaaagaaaacttgagccaagtacaagaaaaaacttataatgtcacaggcatagcttaagtccttttttgttagctgagttgattgaggcataatgtacatacagtaaactccatccgttccgtgcactgaacttgttgtgtgagttggagattggatcctttctttctcgatgcacgtgtcagccacggtgttgcatgtgtcagatcgtcccttttcattgccgagcaggactttgctgatgactgtactgccgttagtttctccatccacctgctgaaggacattgggtcagtgtggccctgcctttccctgcctcctctccctacactcctgccctctgtcttgtggtttctccccatctctcctgcctctctctgtcatctctcttgtctctcctcacattctctagtctctcctcacctcacccctttctccctttctcctcatactcttctcaatgcttcccacttctccccatctctcccagactgtattactccattctcacactgctataaagctactgcctgagattgggtaatttataaacaaaagagattaattgactcacagttccatgtggctggggaggcctcgggaaactcgacttcaattatcatggtggaaagcaaagggggaagcaaaggcatgtcgtacatggcagcaggagagcaagacgggggacgtgccacatttttaaaccatcagatctcatgagaattcactcactatcatgagaacagcatgaaggaaccacccccatcatccaatcacctcccaccaggtccttctcctgacatgtaggattacaattcgagatgagatttgagtggggacacagagccaaagcatatcacagactctcccagtttccattctctctccctctttctccagccttctctccctctctcatttcttccctcccagccactctttcttctctctcccaggctgggcctcagcctacccctcccagtctctcctgattcctcttctgtctcccagtctctcccctactctgtctctcctttctgcagactttttttttttttttttagatggagtctcactctgtcacccaggctgcagtacaatggggtgatctctgctcactgcaacctccacctcctgggttcaagcaattctcctgtctcagccttccgagtagctgggattacaggtgcctgacaccatgcctggctaatttttgtatttttagtagagatgaagtttcatgatgttggccaggctggtcttgaactcctgacctcagatgatctgcctgcctcggccttccaaagtgctgggattacaagcatgagccaccacgcccagccttgcagactcttgtcacaggtttctccttgtctttcgcttctctactaattcctcagtcccatcactcccatgcttctctaatttctccagccttctaggttttcagcattttttccccttctagttgcatcggtttttgcccccaaaattggttatttcctttttgagttcctatttgatttaagggatatctgtcagcatatttcttaactttccagtgatgatggagatcacgttttctcattatttaattctaattttattggacacacttctaattttgttctggtaaggttttcattgcattcaacacatgtataattttgcttgtgggtcataatcaaccacaaaatgcatggtgtctacttgggtagttcaaaattatatgtgcctctctctttctttcaatgtcactgctttcctttttcttttttttttcttttttaattatactttaagttctgaggtacatgtgcagaatgtgcaggtttgttacataagtatacatgtgccatggtggtttcctgcacccatcaacccgtcatctacattaggtatttctcctaatgctatccctcccccagtcccccacccccgacaggctccggtgtgtgatgttcccctccttgtgttcatgtgttgtcattgttcaactcccacttatgagtgagaacatgcagtgtttagttttctgttcttctgttagtttgctgagaatgatggtttccagcttcatccatgtccctgcaaagcctttttttatggctacatagtattccatggtatgtatgtgccacattttctttatccagtccatcactgatgggcatttgggttggttccaagtctttgctattgtgaacagtgccacaataaacatacatgtgcatgtgtgtttatagtagaatgatttataatcctttgggtatatacccagtaatgggattgctgggtcaaatagtatttctagttctagatccttgaggaatcgccacattgtcttccacaatgggtgaactaatttatactcccaccaacagtgtaaaagcattcctatttctccacatcttctgttgtttcctgactttttaatgattgccgttctagctggcgtcagatggtatctcattgtggttttgatttgcatttctctgatgactagtgatgatgagcatttttccatgtgtctgttggctgcataaatgtcttcttttgagaagtgtctgtacatgtcctttgcctactttttgatggggtttttggttttttttcttgtaaatttgtttaagttctttgtagattctggatattagctctttgtcagatggatagattgcaaaatttttctcccactctgtaggttgtctgttcactctgctgatagtttcttccttttttctacccccctccctctcagttcctctcttcttctctgggcagctgctcctctctctgcctgccagctcagtttccttgtgtctactacccttccttagggtgggccatgcctccagtccagcctggggaagggccactgtgggtgctcagaatcagagacatggggaggaggcaatgatggggagatttaggcacccgccttcactcctgctcccttagaaaatccagatagcagctgccaagtcaaggaacctgggctcttccctctactggataaaggtgggggctctagagtggtgtgggagtctagcagtcacacagcgtggtcagagccaatactgggcacctctctttctaaaagttggatgtgaggagacctggtccttaatttcttctgaagagaagcctgtttattcctagagctttgaaaataccggacctggttaatacacccagtctatacagtgagcttggatcattgaggtcgttttattattattgttgttattattactgatgtttattgttgttataaccttgactaaagtttatccatgaaatgggtttgatttactgaagttgtcgacagagggtcccctacacacacctcgcaccccggcctcccaaggtcatgtacatgccaggcaggcagtcctatgagccccgggaaatttttaagactccctctgaaggaagggacagatcagtgatggcctgagagggctatggtgggcgtcatcggcccggcctccgtcccatctggtgctgggtagtctttatgagactctaggaaaatttcctaatcgttctccaggtctcgggaacctcctgttccagccaggaagtctcgaggtgagtgtgtcctttgcttggcagggcccagtgatcacaggaggctcgccccaaatttccccaagactccctactggggccgggctgattgcgtgccggcagccctgggtgaagaaactccgtccaaggggcaccaggaaacggccgtggatcaggccgcaggcagggcacccccgccgacctgaagacccagatcagacctggtgccgtccatgccacttgtcgggcgccacctggcagtcacttttagagggttttctctggcgctccggagaattttggatgggatattacccagctgcggtgtccacagaagcgttccaggaccctggcagcggtggcaggctcttatcggtgttgaccccatgctattgtggaataaattccttgaccttgttcctgcagggaaagagtgctatggcctggatatggtcccacatggaggctgcttatcagattcactgtccacaagtttatcaaagcccagctgataaaatgaacatcacatcccgtttctcctagtcacttgtcctccttccccaggaaacctctatccagttgatagtctggccttccagaagatattacaagaaggaaggcttttcagcacagcatagatttgatggctgcagggacagatatggggtgttaattagcaaattaggcgtctcttttctacccttccctaaagtgtacaattgaaaaacactgaagtccgctgctacgtgtcaggcattgtttaggggcacagggagtccctggctaacaggaaagacaagatgcctgctctcttaacgagcctgctcttcagtgtgaaagaaaaaaataacctaagtttatttaagctttgctctcagatcacacgattataaaacaggaggaacctggtagatagtgtaaagtatttcacagtggggagacattagaaaggggggtttcctaaggatgagcacttgcttatagggagaccagacctggcttttctttagcacttgaaagatgtcagacctgctggtggttggacccagtcgatgctgctggtatgtgctacctgatcagagatggtgagcattaacccgtttaaacctgaggttgtgctgctggtgtgtgctacctgatcagagatggtgagcattaacccgtttaaacctgaggttgtgctgctggtgtgtgctacctgatcagagatggtgagcatttacccatttatacctgaggttgtgctgctggtgtgtgctacctgatcagagacggtgagcattaacccgtttaaacctgaggttgtgctgctggtgtgtgctacctgatcagagacggtgagcattaacccatttaaacctgagattgtgctgctggtgtgtgctacctgatcagagacggtaagcattaacccgtttaaacctgaggttgtgctgctggtgtgtgctacctgatcagagatggtgagcattaacccgtttaaacctgaggttgtgctgctggtgtgtgctacctgatcagagatggtgagcattaacccgtttaaacctgaggttgtgctgctggtgtgtgctacctgatcagagatggtgagcattaacccgtttaagcctgaggttgtgctgctggtgtgtgctacctgatcagagacggtgagcattaacccatttatacctgaggttgtgctgctggtgctacctgatcagagatggtgagcattaacccgtttaaacctgaggttgtgctgctggtgtgtgctacgtgctacctgatcagagatggtgagcattaacccgtttaaacctgaggttgtgctgctggtgtgtgctacctgatcagagacggtgagcattaacccatttatacctgagatcgtgttgctggtgtgtgctacttgatcagagacggtgagcattaacccatttgtatctgaggttacagtttttaaatttgaaaaatcggaccttggtgatgaccttgagcaataggatataaataattcccacattcttagcattccaataatggaacactaggcataaatggggttaatgctttcttgaataatttatgagagtctccaaaagttccagtttcaccctcccccaatacctatttctccctatctttacctgttccagatcggtccttggtccagcccccagaaaggcaggtaaccccagggcatcttgtgcatgtcagggttagtggggggcccagtgtgtgtactgtagacacccatttatttgttttgtggtggagcagttcatcatgaatcttgctgtttgcacatgatcagctaagtgaaaggtccatccccagccaccgtgacgctcattcctgtgaccgccccccccactctcctctatattgcctttgtgattataatttgtgtggaccaactcccatgcaggataattttggactatcaacataaagcagcacagccttgataatgggtgatcagaagctcagtgtgttcctctctctatactgaggcttacaatagacctcctgggtctttgtgaacccatagtgttccccgtgggttctgtgttccatgaccaatggttttcagatgctcagtgtccttcctggttgttggggacccatacccagctggcccctatggccatctgacagcacttcagatgtatggctggtgggaggcacctcactccttgtttgtcctctgatgcccacatatttcctacccttgcctgacagctcatttgcctcccagcatatggccagaggcacacctttagcaactcggacagagcccccattcatcctggggcaggtggccagctctttgtgggagcatggcaggcaactgcgaagtcttccacagtgggatagagagtcctgggatgtagggaccagccctacagggtctgtgggtttttctccccatgtgcggagacgagagatcatagaaataaagacacaagaccaagagataaaagaaaaaacagctgggcccggggaaccactaccaccaagacacagtgaccagtagtggccccgaatgccaggctgcgctgttatttattggatacaagacaagggggcagggtgagcagtgtgagccatctccaatgataggtaaggtcatgtgggtcatgtatccactggacaggcggcccttccctgtttggcagctgaggtggagagaaaggagacagcttatgcctttatttttgcatttcagagacttttagtactttcactaattctgctactacctagaaggcagagccaggtgtacaggatggaacatgtaagcggaccaggagcgtgactgctctgaagcacagcatcacagggagacaggcctctggataactgcgggcaggcctgacggatgtcaggccctccacaagaggtggtggagcagagtcttctctaactcccccggggaaagggacactccttttcccagtctgctaagtagtgggtgcttttcctgggcactgacgctaccgctagaccaaagtcggctaggtaacgggcatcttcccgggcactggcattaacgctagactaaggagccctctagtggccctgtcggggcataatagaaggctcacactcttgtcttctggtcatttctcactgtgtccgttcagctcctatctctgtatggcctggtttctcttaagttataattgtagagagaagattattattataatggaataaagagtaattgctacagactaatgattagtaatattcatatataatcatatctacgatctatatctagtataactattcttattttatatgttttctttattatactggaacagcttgtgccctcggtctcttgcctcggcacctgggtggcttgctgcccacactgggaaatgtgtaagtaacacgtcctgggttgacagggtagaatctgagtaataaatttgtgaatgagcccttggggctgaaatcaggaactctgcagggaccccaaagcccagaacccaatattaaacacggtgttatgtgtcagtttgctggtgctgcagaatcaacgacctctacattcagtgtcatggaacaaccacatcatgattgctcctgagtccataggtcatctcgtgattctgttgatctgggccaggctcagttgaccttgatgggggggttgctcacatgtctgtgctcagcaggtagatagactggattctggttcatctacaaagaactcattcacctgtcctcagttgtctggaaataggcttttctgggatgtcctcagctgggacatcagggctctgtctcctccatgtggtctctcaccctccaacaggctggccagagggtgttcacattgctttaatttcctgagaaagtggaagtaccagagtccttgagcaaagtcttaactcaaaactggcacatgatcgatcactccacagtgtcctatagaccacaaattccacagggtgcagacagtcaagggaatggggacatggataccaaatcttaatagacgtaaagtcatattttgcaagtgtgtgaatgaggaaggagagataatcaggactgtatctgcagcctaccacagaccctcccagccctctttgccaaggctgaggatatttatcacgccccctggtaatcccccaaccctctcctgtggggcaaagagccttgcatcattccttcccccatggggggtgggggttgactttgaagagaccaaaaatgcatgtggctttagggtattctgcaaaatcacggacctggatctttttaccatcaaaaagaaaaattcagaaaagacaatccctgagactctggccctcgccctcagaagaagggttgactattcgggagtcccgctgagtcatctgtggtgctaggaacaccaggaatgattgagcctccagtccaagctccatctcccctcaggcccctcagtatgcaccatccccacaatgccagcatttctcaatggactggacctcaaagtgggggagaagcaggtatgtttttctgaggcatgtcaagaaagacttcattctagatatgttagagatatctcaccttcctttctaaatttaacaaaaaagttattaaatatagaattaataaaggaaaaatcatacttctagtataatttcaagagcccacagaaaacagatactacaaaactcagcccagaaagggaagacgcagggccataatgggagggagaggagaaaagagactgatttggggttgggaggccgatgtagactccagggtatgcctcactggaaggaatgctattcctcactgaattttccctcccagggcggggtgagggtcagattcaagtttggcctcaacctgagctgggctaaagagaagatcaggaagtgaggatgaggatgaaggaaggtggacaggactaggtggtggtgggaacaagtaaacgttgccagagtggataggtgcatcctgggaaagaaagctctgagctctgaggtgtgtctttatgtcatactttggattgagttctcaatctcaccacctgcaaggaacagggagggcaagagacatgagggcccttttctctctcctttttttctccaaaagaaagcatgtttttggagagccgcaggtcatcacagactcaggggccttgtgaaattatgctgggaagcagaaatgagcaaaccggcttctcatgtttgttactttgtctcacagtgaccaccataatttcattaaatattagctctcttctccccccatcatttgattactctttttgtaaaatatgggatttttacatagtttgactaaaagtatctgattttcttttgtaatcttatttactattttatttgtaatcattgaatttttgattcatacttttcttcttggcatagcttgttttccattattttatacatgtgagaggtgttcttttaaaacttcatcagcacagcaataaagtgaaaaccaaagctccttttccactctaagcccttgtctttctccttggagtgattcactgtcctctctggtgagaactcagggttccaaacgtgcctagaagagcacacccacagggacacaacagtgggcagcaggggctggggtgcaggtgccctgtggctagcgctcccaggtcaaaccctgaccttgccccactgactgtgactgtgggtgagttatgaagccactctgtgtttcagtttcctcatttgtaaaatgatgatgaaacccagacaagatgaatcaataattgtaaagagttatgaagaatgctcgatgctcaaattacattaaacattgtggaattgcttttctgaaaatattttgtttgttataactttacataaatgcctcattcttttgcttttttttttttttgaaatggagtctcgctctgtcacccaggctggagtgcagtggcatgatctcagctcactgcaacctccacctcctgggttcaagcaattctcctgcctcagcctcccaagtagctgggactacaggtgcccaccaccatgccgggctaacttttgtatttttagtagagacaggggtttcaccatgttgaccaggctagtctcgaactcctgatcttgtgatccacccacctcggcctcccaaagttctgggattacaggtgtgagccactgcacccggtctcttttgctttttaaatagaattatttgaagtatttttgaagaacaaagcatggagtcatcccagcctttctagtggctgagtattattgtggtatagtaattccctcttatctccactttcactttggcgtaggtttcagttacccatgatcaactgtgatctgaaaatattaaatgaaaatatcagaggccaggcatggtggctcatgcctgtaatcccagtactttgggaggccaaggtgggtggatcacttgaggtcaggagttcgagaccagcctggaaaacatggtgaaatcctatctctactaaaaaattacaaaaattagccgggtgctgtggcatgtgtctgtgatcccagctacttgggaggctgaggcaggagaatcacttgaacccgagaggtggaagttgcagtgagccaagatcgtgtcactgcactccagcctgggggacagagcaagactctgtctcaaaagaacaaaaacaaaacacaaaacaaagaaaaaacagttcataaattttaaagttgcgtgtcacactgattgtgaaatgccgtgtcgtcccgctctgtcctgccccgctggtgagtcatccttcgtgcagcatattgacactgtagatgctaccggctcagtagtctccagtagctgtctcagttatcagatcaactgtcatgctattgcagtgtttgtgaaagtttctcaagagggctttctttatcgtaaaataaaacctttattttactttgtaatggccccaaactgcaagagtagtgatgctggcaattcagatatgccaaacagaaactgtaaagtgcttcctttcagtaaaaagatgaaaattctccacttaataaggaaagaaaaaaaaatgggctgaggttgctaagatctatggtaagaatgaatctgctgtacctgaaattgagcaggaagaaacagaaatttgcactagctttgtgtcctacctcaaactgcaaaacttacagctgcactatgtggtaactgttacaatatattgtaactgttctattttattctatcttggatgtctcccttcgatgtaatgatgctgctctgtccagcagacaccgctctcgggtctaggctgctatcagttcaggaagagatgggtatttctggtcagagtattaccacagtgtgttggctcagcctctctgtttccaccagagcccaacaacatgttaatagctccttcagaaaaggtgcatgatgagtggccatttctgggagcctagaagtccagaaactttgcggtcatcagactctgatggcttttccttttggtcagattccagtcttcctcatctcctagcactgaaacttgtcattcaaatggggagctgggctctacgggacacaggggcctgagtaactgcctgaggtagggcctggagtgcattgtactccctggacccccactgggggtccctggaaagcagctatgtctctggttatctggtgcagggggaccaccagaatgcccagatggagtctatgttgtctttaatatccaaaatacccagtgaggcgttgactccacggtctgcaagggcctctctctgcctggtaccagatatcagatgtggaaaggctgtcaatctctttgttagaaacctcctgtggtatcagccaggcacccagaggctgcctctggcacaagcgcttgggtttagagtcttctgactttgtttattttaactttcatcactcattgggtctgatcccattctgctgcagaaagcagtaaagcttttcaatggcttcaccagggacaatgcaagcaaaaaccaatcaagggccggacacggtggctcacgcctgtaatcccagcactttgggaggccgggggaggtgggtcacttgagatcaggaattcaagaccagcctggacaatatggtgaagccccatctctactaaaaatgcaaaaatcagccagacgtggtcacgggcacctgcaatcccagctactaggaaggctgaggcaggagaatcacttgaaccccgggaagcagagattgcagtgagctgagattgtgccactgcactccagcctgggtgacagaacaagacccaggcttcctcattttatatatatatatatatatatattttttttttttttttttttttttttttggtagtgttttttgttttgagacagggtcttgctattttggccaagctggtttccaactcctggcctcaagtgatcctcctgctttggcctccaaaggggttgggattacagggatgagccactgcatctgaccaagacttttttttttttttgatactgagtctctctctgttccagaggctggagtgcagtggcatgatctcagctgactacaacctccacctcccgggttcaagttatcctcccacctcaccctcccaagtagctgggactgcaggtatgtgccaccatgccaagttaatttttgtattttttggtagagacagagttttgccatgttacccaggctggtctcaaactcttgacctcaagcgatcctctcacctcggcctccccaagtgttggaattacagatgccactgtgtccacccagtggtgccctgttaattaatgacccttgttatcaattaagttcccctttgttgtcctgccttgcttagatcagataacagaaaaaccatgactattacaccctttgtaaaaaatgttaaatgtgcccttctcatagagaaacattgcctataagcaacttgctgtaatgatgtgccaaccttttatgaaaaatgttgtaatcctgataaaaacacctctgtctttgcttatatacacgcaaagacagaggagtctaaatgtatgtatttatttagagacagggtctcactccattttctggacaggagtaaaatccactccacttgcacccccagggccgggcaggtgacgctttggcccctacctgggagacactagagctcacactgtgggcacctctggagctgactggggagattctcctgaatcctcggctcccgctgggtctggacaccctgtggcttcccgatcacaggatggcttcacacctcttccgctgtcctgggcccttgcactgattcacatctagaaggggaccaggtcatggagcaaccctcagtccgtgtctcgactctagactcacagggtcagctgtaacattgtggctgtgtgagtgtgggagggtgaggacgaccccaggagtgtcctgcaatttcctatttgccaaagaagcctccattctggaggagagagggaccgagggtggagggagcatcggtcctctcctggctctcaaaggacctggcatcaaatccaccatgacacataccctgtctgggacctgtctcgctccagggcccagcatgtctctgcaggaaggcagggcatcccacgatatcaccagctcctctaggagtataggagccaaggagctgctgagacctgctgatcacccactcactcccctccagccaccccagagccatggctcccgaggccacatcttgggtaaggaggacaggaccccattcccacccgagcccatctcccatctcagccaccaccgaggctcactccccaccccaaactacacctcatccctgtccccatgcctggcctcctcctcagacatggctccatcacagcaattccccatccacagcccctgggtcagccccatccacagctgtttcagtccccaaactactccccaaacttatgcctagccctggttccagtcccacccagtctttttctaaatgtcagtgccagccacacccatagcacaacgctagtctcggctcagccccttccctgcccgaccccagctgagcctccagctctgaactcctccaacaccaggaaacaaccacattgccctgaaccctaggcccatttcttctgagagtcctgcctgcactccctggccttgcccaggacccttgagcacagggagactgtgcctgacctcagatcaccttctagcccttcctcgagctccagtcaggacagagacccccttggacccagtgctgccgcaggctggggtcccaaagatggctcgtggcctcctccagagccctcctcttcttccttctcccacagctgtcttggcgtctctctgcatcctcagccttctctgatcatgtggagcccccaggtgagcccaggaagggctgggaatctgggggaggggtgtggctcccaggagatcccaggctgggacccacctgcccttccacctggacctcaccagctctgtctcctccagtggcccccatgggtgcttatctgatgctgtgccagccacaggcaagatgtggggacacgttctgtgaccctctgcagcactgctactatgacaatgccatcctgccctcggatgggacccagaggggtggaactgcaccttcagagtctgcttcgagaagtgctgcccctggtccctcagtcccccagcgtccctcatggtgaagatgaaaggccagaagtgctccttgaccctgacctcagataacaggctttgtcacaggtgaggtcctgtctcctccatgagattgtgggtcctggggggctgcatgcctgttctgccctgagtagagcccccattctctgtgtctgtcctcctgcctctagtcaatccacctccccctttccctacagttgtatttcttcctcccttcgtttttattttcctctcacaacctcactctctcaacattgctggcctctcctcctggctctcctgtcctcctttctgcactgttcagtctctcccccatctctggcctgctcagtgtctctgtcttcagtgtcagctcagactggagggcagtggctcaatcacagctcactgcagcctcaacctcccagactcaagcgatcctcacacctcagcctttagagtagctgggaccacaggtgtgcaccactgtgcccagctaatttttgtattttttggacagacggggtttcagcatgttgttcaggctggtcttaaactcttgggttcaaacgatcctccctcctcatcctcccaaagtcctgggattaaaggtgtgagtcactgtgcctggccaggacaggagccctggactggccctggctgccctcctcccatcacagatggggttttgtcatgttgcccaggcttgtcttgaactcctgagcttaagtgacctgcctgcattggcctcccaaagtgctgggatacaagtgtgagcaaccacacctggcccctcccctccccctccctccctccctccctccctcccttccttccttccttcctgccttccttccttcctttccttccttccttccttccttcctttctttttcctttctttccccccttcctcccttcttttttgtttttcagggtctcactctgttgcccaggctggagtgcagtggtctgatcatagctaattgcagcctggaactcttgagctcaagcaatcctcctgccacagcctcccaagtagttgggaccacaggtgtgtgccaccatgcccagcaattaaaaaaattttttttttgtaaagactggattttgccatgttgtccaggctggtctgggattcctggcctcaagcaattcttcctcctcggcctccctaagtgctgggattacaggcatgagccaccatacctggccacttcttcattcttgttggctttgcgtccctggaaaaaaaaataaattctgcctcggtatgtggcttaccagagtcatgaacgaaggtttcactacaaggcagtttcatatatagaaatgaaaccataagtttctgggtgctggctccaatttttggagttggtgtttctgggtgggctatcctcaacattcgtgctggaataaactctctttaaattagattctgaccattttgatcaccaggttgacaccatccagtctttggtcaccaaagcccctttgcaaggagagagagatcagccccttcaattctgataactatgctcggagaaaatgagtgacacagcttcctcatcagccagcaaagagaggtgtttaggctggagagcttccgtccctcctgtacacacatgcaatgccaccccatccctgcctatcccctgggaggggctccttgaggccagatggaactaacaccacaaagatgccaggtggaagagtcattctatttattcctggacaaaagagcaagtgaagagagagcctttgagagtgggaaatgtcaaggcccccacggtttcacattccaggagcccagctctgccagccccaccgaggaaccctgggaatgtcagatttgggtctcatccagggatatctgtgaccaaggcctgcctccccttcccagaggggctgggccagcagaggcagggtagggcagcagttggaggcctgtggactggagttcaggagacctgggctctggtccagcctgtgtctgtgaccagcagtgggtcctcggaccgtgtcttgcttggattagaaagtgagatgggagaattaaacaaatgtctgtctgaggtcaggatcttgcccttacttgtcagaaaaacaacctcctttcaccgtgggtagaggtagagttccaacccctgaggatcagttccaccaaggcagagctgggctccagtgccgaagacagacctgtccccagacaatggattggatagggttggggactccacggggctggcggaggcattggacagctctgtgtgcaaaggcttttttgacacctggagaaggggcagagacaggagcactggactagccctggccaccctccccgcttcccagcctctgagagccccctgcgctgtcatgatctccctccactgtctcaccccaggcctgactcagccaccctgagagatcaggctcaggccaaggagggtcagctagactcctctctcctcgggacacaatcctaatcctgacccaagaaacctgctttctcccaccagcgtctaggcctctacctgcctcgagccatcccaggaaatgcctggaaccatggtttgagagatgaagcccgttattgggagatgtgttgggacatctaagtcagcagcacttaggcaagaaggaagccaggccatgcctgcacccttcttcattcctttttaaattttttttttaattgagacggagtctcgctctgtagccaggctggagtgcagtggcacgatctcggctcactgcaacctctgactccctggttcaagcgattctcctgcctcagcctcccgagtagctgggattacaagcacacgccaccacgcctggctaatttttgtatttttagtagagatggggtttcaccatcctgaccttgtgatctgtccacctcggcctcccaaagtgctgggattacaggtgtgagccaccgcacctgccctaattttttttaatttttattttattttattttttgagacaagatctcgttctgtcacccaggctgcagtgcagtggtgtgatctcagctcactgaaacttccacttctcaggctcaggaaattctcctgcctcagcccctgagtagctgggtctacaggcccatgacattatgcccggctaattctaatttctgtattttttgtagatatggggttttgtcatgttacccaggctggtcttgaactcctgagcttaggtgacccacctgagttggcctgtcaaagtgctgggattacaggtgtgagccaccacacctggcccttttcttttcttttcttttcttttcttttcttttctcttttcttttcttttctttctttcgttcagggtctcactctgttgcccaggctggagtgcagtggtcttatcatgactaatttcaacctggaactcttgagctcaagcgttcctcctgctacagcctcccaaatagctgagaccacaggtgtgtgccaccatgcccagcttttaaaaaaaaaaaaacttttgtaaagactggattttgccatgttgcccaggttggtcttgaactcctggcctcaagcaattcttcctcatcagcctccctaagtgctgagattacaggcaggagccaccatacctgaccacttcattcttgttggttttgcttcgctggaaaaaatataaattctccctcaatatgtgacttaccacagtcatgaaggaagatttcactataaggcagttcataaaaatctgtgcagtgtacactaacccatttttgtgtctgtttcttgaattaaaaaaataatatctatgacatactcaagcagttataccacccaataaaatgttgccacccttagtatggaggacactactctttcctgaactgcaaatggagaagccaggggagcagagagcaatggagaaggagaacacgctgtcccctctccacaagggaggaggaagactgcaggcccctcgtgattgcaccattacccagctccagactcaaccctcctctccaccctcctcacaagagagatacagggatgttctacaaccataaatctggtcacttccatcccctgcttaggcctgggccatggtcagtgccctcaggatagactggagttctccaagggcccataaaaatgccccagccttgctgcccactccagtctcctcttcctgccttgcattctggcctctgggttcagctttgtcgaaacaggcacagttctcattcattcttgaaatagtagctcaaatgtcttcttctcctagaagacatcgctggccttccaggctgggtgaggcaaccactgtgggctcccaagcctttacgcgtccccaacccagccctgactctctgagtcatcaaggcctgaggacaatctgtgttcccagtgatggcacatggcccgctattatgtctctgctgtgtcctctgcagcacgtcggggtaaggatgattaggttttaatgggatagtaacgggcgtgtgattggttgccagggagggagtaaaagtgtcccatacttgtgggttaaggttgggggatacaagaggaagacgtgaaggaggctttaggttggggagaagggcggcactgagatgtggctgtagtccaggaatagtcagggtagtggataattttgttaagatgtaaaggatcattaaccttgactctgccttcagctccagccacctctctaagaggaaattgttgggcaggttggggagggctagtcacggaacaaaactgtaagctggaccggttgtgagtgggggaggcgatagaaggattatagggtgggagagtggaagctgaggaagaactgggacctcgcttggcctggtgaggagcagtgtggggaggaggggagaggtcggatgagttcacagaaaaagaagatttaaaggactcagagcttggggtggagactgaaggaacagacaggagagaaagaagaaagatctggaatgagtcacattgggagcagagactagggaggaactgatgtgtaaaaggatgcctggacatcaggcacctcagaccatttgcccattttttgacaaaattatctagatcttgtaggatggggaaatcgaaagtgccattttctggccatttagaacaattgttaagtttgtattggggtcaaatgctgttgcagaagaaaataagatgcttaggttttgggtcaggtgagagttgaagaggttttaagttttttagaacacaggctaagggagaagaaggaggaatggagggtggaaggttgcccatagtaaaaaggtaagtttagagaaaagagagggtagagacatggagaggggggttggtacttgccatccaggggaggtggtacttgccaccaaggtgaaggatcaaggcaggcgtccctgcagtggtcagacacctctggaatgtgggtgaataatcagacatgcatccccacagtgattagacaccaagggaagactgtcttcccgagtctgtgaccagcagcagaattttgagttcatggacaaaacgtgtctcctctgtctctaccagaaacggaaaggaaccaaaattaagggagggagagattaaagagtggagggatatctagcaagagaggttggagaagagaatgaaaagaggctacttacccgatttaaaattggtgagaagttccttcggctgggctgaggacccgaggtcatgggtggatctcatggagagagggcgaggacaggggaccggtctcccaaaggagtcctcctgtctcaggtcttcggcaccaaatgtcacatgagtccatatgaagagagtccaccaacaggctttgtgtgagcaacaagactgtttattttacttgggtgcaactgggctgaatctgaaaagagagtcagcaaagggagataggggtacagcagttttataggatttgggtaggtagtggaaaattacagttaaaggtggttatctcttgtgggcagggatggggatcacaaggtgcagggtggggagatcatgagactcattgtctaggggaggaatgtcacaaggttgatggattagttggggtggggcaggagcaaatcacaatgatggaatgtcatcttttgtggttcttcagttgctccaggccctctagatgtatacgtgcaggtcacaggggttatgatggcttagcttgggctcagaggcctgacaccagagagttggccaacaccccggtacagttggccagctgcactagagctgctttgttctcctgatttgaatttcagtggtttcttacagtttttgctgctgctgtagagcatttaagcaggaagggatccagttcagccatccagggactggcacccaagttcttgttgcaggtagcagggaccagcttgcaagcttgaagtgtgcagatggaacacagagcactccagccacccaggcagatatcagaggatgggccctcaggcactggtgaggcccagtcctctccctcagtgacatctgcattcctagcattctgggtttttttgtttttgtttttgtttttgtttgagagagtctcactctgttgcccaggctggagtgcagtggtgcaatctcgactcactgtaacctctgccttccaggttcaagcaattctgctatctcagcctcccgagtagctgggattacaggtgcatgccaccacacccagctaatttttgtatttttagtagagacagggtttcactttgttggtcaggctggtctcaaactcctgacctcaggtgatccacccgtctcggcctcccaaagtgctaggattacaggcatgagtctccgatcccagccctaacattatttttgaacatctgaaatttcaccagattcctgtctgtcacctgggagaggctccctgaggccaggtggaaatcatacccggatgccaccagaatgatgattcagccctttccgtgcttgttccagaggggaagcccatgaaaggaggacagccagtgctctcctgtgtgccacgttccagaagctcaggtctcccaccagcagctggggttgtgggaaagtcttccctgaggccagcccccgggtgcctgggatcagggcctgcttgcctttctggacgagctgggcctgggactggggggggttgctgggctgagacaggggtacctgggtccagtctagatggtgtctgtgacctgcaggggcccctcatgccagggtgctctttacatagagggaatagggtgagaaaatatgaccaacagatgttggagtttactgttatttcccaggaagccatgagaatcctgtgaccctggaaagagacagggttcccaataactagggacatggcagtgagtgatgcagccctgctccctgtcctcaaacagctctaggtccactgtccctaaacagtgacaacacagagtgggcagctttgggatgtggaatgcacaggcggctgcttcgggaattttgatatggggttttagcagctcctgctgcttgctgggaaaaatccctcagggaattgtaatggacttcaggagaaatgacacacaggtgctcgtgtatatgaaataagttgttgttttgttttttgtttgtttttgagacagtctcactctgtcgcgcaggctggagtgcagtggcacgatctcggctcactgcaacctctgcctcccggattcaagcgcttctcctgcctcagcctcccaagtagctgggattacaggtacctgccaccacactcaggtatttttttttttttttgtagttttagtatagacgggattttgccatgttggccatgctgttctcaaactcctgacctcaggtgatccacctgccttggcctcccaaagtgctgggattacaggcgtgagccaccgtgcccagcatgaaataaattttataacctgaataggacccggtaatataggagttaagaagaaattattttaggcagatagtgaaggtaagaaagtccttggtaaggtttttcttttaatgaaaagcaccctccaaatcatatacttttccaacaaacagcagccattaaaatcaagccacagacatagaaaggcaggctagaagcttccacaggtgaatgccagcatttgtgccaataggaaaaggctacctgggactaggcattttcaaaatggcagctccatcttcccttttcctttccaaccacatgcacagtagaaagcagataacatggcatccaccaagtggaaagtccatttgcataataagattagggtggggtggtcagcttcttccagcactatgtaaatgtcacagctgatccaaccaatctgtgggccctatggaaatcagataccacctcttcaaacccgtctataaaatccagtgcactctgctgtaggctggaagtcccattcaggtgctgagagagagagagagagctgttcttctttctctctcttttgcctattaaacccctgctcctaaacccacttcttgtgtccatgtactcgattttcttggtttgagacaatgaaccttgtgtatttaccccagatgatgacgccacattaccagtgtcagcactccccaagaagaaggattgaggcttggtccagtgtgaagcaagtgggccgttaaacacgtggctttggctagtttttgagcatggggctatggtgagggttgctgcctgtgggctggggcttgagtggtttgaacgtccttctgctgccaagacagaaagcacatggtgtgcccagatgtgcattggaggtgactgaggaagggctgggaagctgacaatatccaaaaatctaatgttgttgtcatacagggagataaacagggctactagaaaatagcttatctgaccctttgagaaaatgtagagagaagagtccaacccagggctgtttgaccacaaagtctcaggattgctgagagagggactcttgcatccacagagccctggccctgccccactgccctccctcgaacccagcttctgacaccccctgccccgtcatcatcacccactgctgttttctctacccagcctgactcagctgccctgacagatggggaccaaggccaaggagggccagctgggctcctctcttccaagagatggcaactccagccctgccctcaggaatgtgcttttctccctggcactggctgctctccaggcctaaattcaaccctgtttttagcacagaaaaccaggccaaatgccacacccagtctcagcatacgaagcacctagaactgacactgtgagctctgaactctttgtgtgtgtggggcggggtgagggggagcaacatgcccggacaggtagtcagtgatttttaagaaagatggaggcgagcttatacccagaggatttttccttccagtgtttagtaactgtttggctgtgacttgctaggaagcactcatattacatcagtccaaaagaaagtttaattgaacactgatgaataagacactgtgccatgcacactcttctatttcttttgattctagttgaatgtataagatacccatgttgatgaataaattgattcacaacctgagagtgtcacaatccccatgttggagatcactgctctaccctgcagcttcaggagaggggaggccagaaggcagaatgagaaatggggtcgggggtgtgagtgcttatctcatccacccatgacagcgagtgggcctgcaggactctggaaattgcatgagaatttctgctccatcagcttcctgcctggtctcatgctcccatctcaatcctctcacccaccctcctcccagcagaaggacacacggattttcctgaatcacaatctgatcacttctatcccctgcttaagacctgtctgtagcttgagtacactgagaagaacagttctcaccaaggctcataaggggaggtggacaggggaagcgatggggatggtgggagcttccctggccttcctggacaccccatcctctcagcacctccacatgttcagcaactgggaagttcaactctagtttttcaagagtttttataaagtttggtccttatctcctcgccattgccacttttcttggaagttggtgggtgatactgaaagtttctaccctctaatcctcaaatcttttggtctttgtgatgactggcatgatactgaggctacctggggacccttccctaattcacattttttttttttgagagggagtctcactctgtcacccaggctgaagtgcagtggcatgatctcagctcactgcaacctccgcctcccaggttcaagcaattcttctgcttcagcctcccgagtagctgggattacaagcgcccaccagcatgcccagctaatttttgtatttttcgtagagacggggtttcgtcatgttggccaggctgttctcaaactcctgacctcagatgatccacccgcctcggcctcccaaagtgttgggattacaggtgtgagccaccgcacctggcccctaaatcacatttttagcatgaactcagctggtgtgatctgaaagagtctcatctggaagaacaaaagacattcctatcactcaggaaattccaagtttagcttcatggtaggaacaagagtcaaagaacaaacattttcatgttatagcacacccagtaagccatgggttcatcagattggactctctttgctctgccaaattggcagcatttgtgagttaccaatcccaagggaggactcccactgcagggaggatggcaaaggtcaccactgcgctaaccacccggaataggggtctgaacacttcagccaccgcatcttgggctgcactctgactacactgagcgtggtgaacagaacacccacagccacagccagttcgacaaagcaggttaattacttacagacaggcagcgagggacagcggaagcctaggctgcatgactgttcatctctctgtacgacaagaacattcaatttttggatattgtcagcttcccagcccttcctcagtcacatccagtgcacatctgggcataccatgtgctttctgtcttggcagcagaaggacattcaaactggtctcccggggctcaggagcactgcccagggcagatagagtctcccatgcctgccccacttgcaccacagctgaggactcagcagtgagctctgggttttagatgtggtggacacgccctgggctagtgtggcaggacaccccctctaggagggatgggaatgaggccagggctgtcctgggcagtttctctttagctcaaggtgttgcattctctcggaggaatagaaaccaagcttgggcactttcaggcagttcctccttactcaggatggtgcattcttatataatttggctctgtcttgccacacaaatctcatctcacattgtaatccccatgtgtcaggggaaggatctggtaggtgattggatcatgggggcagttttttccatgctgttctcctgatagtgggggagttctcaggagatctgatggtttaaaagtgtgtagaagttcccggctcgctctctttctctcctgccaccatggaaggcgtgccttgcttttccttcaccctccagcatgattgtacatttcctgaggccaccttggcgtgcagaactatgagtcaattaaacctctttcctttataaattacccagtctcaggtagttttttttagcagtgtgaaaatggactaatacacatttctactgtattctacagtgattctgggaactgtgggcaagaagagaggcgggaaagccagagccatccaatgcttgtcttctggtgccctcctccaggaagccattcctggtgccctgggcgctgctcccagccttgctcaccctgggtcatcaccgtttttggaggggtctgtgtcctccccagactataagacccagaaaagcagggcctggagctaagtcacagtcgtgtccccagcatccactgacacagagtaagtgcatagtgtgtgctaaatgaatgaaagaaaagtgaaagcatgatgaaagccctgtgttcagggtgtgtctcactcaacctgtctgtcctgtcatggtgacttggtgagaattgttgcctgaaggtctttaaagctctctcccttccagggcttccgcatggagctgcttctcagctgtgccctatggggtcagatgcactggggaagaactaaggctcttctccacagcccaccttttgtccccttagccctcccaacataggacacaccatgtccagggctgcaggagcccaggctgtcaacagcatcagcatcctgctagaagagggtagggatggctggtactcagaagagccttctagattcctaagtttattaatcctttcactgcaactactaagaaaaataggtgtgacattattactgggttacacacagtcacacacacacacaaaaagcgaaagcaaaaattgtcaagaatatgtcagcttccctcaggggagtggcttcttcaactttgatcccaaatgacttatttcagaggaaacctctcccctctcctcagaacaaacacattcacacaggaagggattaaattcctgcaaagaagaagaaggaaaaccttccactggtcctttggtcttaactatcctgggccataatgtatttgagagtccagtaatgactgtggatttttttgctcaaaatatcacagatgattgccaaacattgtgaaatgccattgaattgcacacttgaaaacacacacatacacatgaaaacttaagtaaacgcatatacttaattgtgggggctgcagggggggagcggaaagaaacatccagacatctggtggtaaatattctgctctggttcagctaaaaataaagccctttatcagtttggtcactggaaggacttgttcccttcttgttgatgatcagaaaccttagcaggaactaattctcaagtgtctgccttaacagaaaagccacaaagaaacatggtaagagcgtggcagataacatccacggtgctatcgggaggtgacaggtgactgacctcagccttggtgttcaagaagattccagaaggtgggtgacatttaagggaaaaatgaaaaatgaagagggatgggagaattggaggcagaagccagagagacattgtggttcttccaaggaactgtgctaagtcgagggcagtgagagccagggaaggtgtattaatcagggttctctagagggacacaattaatagggttctttagagggacacaatttatatatatatatgagtttattaagtagtattaactcacacaatcacaaggtcccacaataggccatctgcaagctgaggagcaaggaagccagtccatgtcccaaagctgaagaacgtggagtctgatgttcgagggaaggaagcatccagcacgggagaaagacgtaggctggaagctaagccagtctagccttttcacgtttttcttcctgctttatattctggctctgctggcagctgattagacagtgtccacccacgttaagggtgggtctgcctttcccagcccactaatgcaaaagttaatctcctttggcaacacccctacagacacacccaggatcaatactttgcatccttcaatccaatcaagttgacactcagtactaaccatcacagagggtgtgcatgatgtggaggtggacacttggcatccagccaacttcttcaggactttctggtctgcagaggctggaagcttcacactttccttcccagagggccttgcaggtggggttctggatacatttgaatctctggtagcacagtcattgtgtctctgggtgtatccacagtaacatctcacatccaagcaatagctctgaatggctgaaaggctgttccagacacagaaatggcacctgaatcttgagtctcagctcagcagattgttctagcttcattcctggttggcaaaccctggggcctctcctccagcctctcctatgacatggaggctcttaattcactggtctgcatcatacgaaggatcctgccagagcagggattaggctttggtcaacagaagccaccttgcagggagcttctgaaatcccaacatagtgtttggagaaaatgactcacacagactcctccttgtcagccagcagcggacaggcctctggcctggggaaacccggccttccttctacatacctgacatacctgcacacctgaaattccacctcattcctgcctgtttcctagcagggcttccctgagggcagatggaaaggccactccaaatctgccaggagggagattccttctattttttcctggcataaaagggcaagcagtgggggagctgctgacagctggaaatgccaacgtcctccggggtttcacattccgggtttcacattccagaagccaagatctgccagccctgcctgttctctcaccccgcttcctggatccaagcaagacacgggctgaggtactgctgctggtcagtgacgcaggccaggcaagaacccaggtctcctgacctctcacccatgggcttcccaactccccaggcctggtctctctgagaaaggaagacaggccctgttcacagacactcctgaatgatacccaggttctcgggccaggctggcagattttggttcctggaatgtgaaacctctgaggacttggcatttcctgctgtcagcagcttccctacttctattgtacaatagtataatatgatcgaatgatagaatgatattctaccattacgtggaatacacacagttccaataagagtgtcataaacaatctagcacagcattctggttagggcacactgtcccatttcttaatccattttttttttcaattaaaaaataacattgcttatgcccaactgatggttttccatgttatcagcacgtcctaatctgtgtcctggaaaacaacactctaccccacagcaacaaggcatggaggccaatggagaagacagggagatggtgctggaagcagggtctgctcttcccctggggaaggtgcgtgctgagcactctggtatttatcatgagatcatttctgctgcagcctcttcccttgtcgcctgcctccagagagaagcccctgtccatgctccccagaaagatacaggatcttccacacacacagatctgaccacatacatcccctgctgggaataaccctggggagaatggcttgtccataccaggtgtggcctgtgaactcacaaactgaggaaatcctgcagaagctgggaggggcccacagaactgacccaagacagcttcttcccctctgttttttcgtcctgaccccaagatggctcttctgtggggaaatcacacacccgaccctctgaaaaagcacgttaaggaaaaatgtccttgaaaatctcaggagggctgtggaatttctccaccaccagaacttcacagtgacaatgacaccaaacacaagaacgacaataaccaaaatcaggagttttattctcctaccttctctctctctctctctctctctcctctcactgtcatgaacgtcacgaagacactgactttgcattttctactcagcactgcatcaccagtgtctgacacaaagcctgggacatgtgggcttccaagtggacctctcctggataaatgaccattaatgaaacagagaaggagttgaagagcccccagaggagtgtgagtcccaggggtcccgccagctccactcccaccttccaaacctgtgaaagtcaggtgcctgagtcgcacagtctctcccacccgaatgccatgagctgcaggtgagtgagcagttactgcatcctgggccatgggcttgggttgtgaagttaggacctgattagaggatgtcaggggttagcaatgtaccaaggaaagtggagaaagtcatagctcaatgggatcctgtggaatcactgtgtggctgtgtgagtgggggagggcggtaactataggagcatgctgcaccttcctgtttgccaaagagggggcatgtaggacacagaagcggagggtgcaccacttctccctgggttctcaaagtgtctgagatcaaatctactatgacacataccctgcctggctcctttactgcccagcgacccagcctgtctctgcaggagggccagacatgccgtgacatcaccagctcctctaggaatatgggatacaaggagtggctgagatcggctgatcaccagctcactccgctgcagccgccccagagcaatggctccccgaagccgtgttctgggtaaggaggggaggaccccattcccaaccgaacccatctcccatctcagccaccaccagggctcgctccccaccccaaactccctgttccctcattcttgttcccatgcccagccaaatctccaggcgtgaattgctcacagcaattccccatccacagcgcccgggtcagccccatccacagccctgtttcagtttctgaactgcccaaagccataccgagccctggttccacccaatcttcttctaaatgtcagtgccagtcgtatctgtggctgtccactcaccccatcttccccttccctctcccacagctgtcttggccgctttctgtttgtgactctccctgcctccactccccccaccaccccatgaaatgatctcatttggtcatttaaacggaaaactaaaaagttttaagtgactctaggagagcaggagagaggcaggtctcccagctcagaccccgccccgggacggccccacggaagatgcacatctggatgtaggcgctcaaggcaccgcgcgtgcgccgagtggccttgctcagctccgtccttctgaaacccggaatcctcatgtgtctgggtcccgccccatcctggcctcctacaccactggtccagatcctccaccttcccccaacgcgaggtattgacatcaaagcatcacctcatctggcacaagaatctgaaacacagaccgcaccttacaccaacgtagtgaatccctccttggacctgagttcaacaagcccagagtcggggctctgggttcccgcccaaatgccacgcatgcacacagatggcacctggcgtctcctcaaagggacaggaatcccgggcttcccagaatcaccaggtcgatttaaatggcatcagatgaactggaaaagaatgaaagtgctattgcctaaagtgatgaaattttcagaggatgtatcggtcctgtctggtggacagacggccaccagagggaatgaaccagtcttctctgaacatccatgaggatgaagaacagtcactgaggtgacggtaccaagtcaccggccacctcccagggatcctctcatccggtcctcacagcagcgctgcatggtcggacctcatcacccacattccaccaagaggaagctgaagcccagggccttcatccactcatgtcctccagacccctggcacccatcctgggccccaccccatcatccaggccttgggccttcgacctggggagagtccctgtctcctccatgagccgtccagggcctgaagaggtatccaataaacaagaaagcagaacacaaagagctgtgatggagtggatcttatgtagtaagaataaaattattttgagaaattactgggtcatgtatttacccacagaaaaacagaagcaaacacacgcgtgcgcgcacacacacacacacacaccacacaggctgtcacgtgtcctcagcacaaagtgccttgagaaaggccattgctggccccacacttatcctgactgtgatcttgctgtgatcagcacatcccatcagtgtggcaacaggtgtggccagagtgggaaccaggccttttcttcagatttgctctttgttcctgaatagccaccgtcagaacagacaccctcctaggagtcacttgattaaaaatttccttttggatatttaggttgatgttttatccatcggttaaagtataaatgtatatttattataaaagtgtaattatggctctaattaatgattatggtgaattttactaactatagctatgaaaatattccaatagataaaaacagtgctaaaaatgtacagttaatccaagagtggtaactttaagtcttgtaatttttgatctaataaatcttcataaaatatacatgatcatgaagtacatcagtagaattaatcctaatatttacagcaatacttggcgtgctgtctctcataaaaaataacattaatagtaaaaaaaaaaagaagaaatcggccaggcacggtggctcacgcctgtaataccagaactttgggaggccgaggcaggcagatcacaaggtcaggacatcgagaccatcctggctaacacggcaaaaccccgtctctactaaaaatacaaaaaattagcccagcgtggtggcgggtgcctgtagtcccagctactcgggaggctgaggcaggagaatggcatgaacccaggaggcagagcttgcagtgagccgagatcacgccactgcactccagcctgggtgacagagcgagactccatctcaaaaaaataaaaaaataaaatagtaataaagaaatgatgaaatttaaaaattctatttaattttgggttgtttaattttcatttggggcatgactatgtgaagtaataaattttgtttgggcattaatatgggatgacctatgtctccccctaaattcatgtgttgaggtcctaaccccagtatctcagaatataactgtatttggagataaggcctttgaaaaggtgattacagtaaaaggtcatatgagcaggacctaatccaagctgactggtgtccttataagaagaggagattagggcacagacacacactcagcggccatgtgaagacacagggaggaattggccatggataaaccaagggatagaccctcagaaaaaaccatcctgccaacactttgatctcatgcttctgccttccagaactgtgaggaactgaatttctcctgttcaagccacccctctggtgcccttgattatggcagtcctgggggattaacacaggcagaaggaaaatgaaggatgcaagagtcagagaaaggaagaaaatgaaatgtaatttctcctcaaacaattttcaaaataatggactttgggaaaacactttcaggaaattattctaaactgggtgtttgacgttttattctaaactgggtgtttagtgttttaagtgttttgaagtttttactattaatagaactatttgaatagttgaagaggaaacatatttgaaacctgatgatattatgactcctggctaaggttctgtaaccaatggaaagtcttgactgtgagttgtccaggctcttggcatgttaaacaaagaattgaacaaaaatcacaagcaaaacagcggaagaggaagacatagatttattcaagtgaaagtacatgccccagagtgggagtgggctcgagcaagcagctcaagagctctgagtgttggtaacccccctggggtaccatttagaggcctccaattggttgcaccctatgcaaatgaaggatttggtgcgtggccaatcagagactgaagtggagttacatcctatgcaaatgaagattgattggcggccaatcagaggctgaagtgaaggcttggcccatggccatcaaaggctgaagttctccctttggtttaattccaagaagtcagccgtgggttggccttaggctccttgtctccagaccctattctcctgcctcagttccttctttagaatatattactaataactgcctgggaatgatattgccctagacatagacacttgagtgacttcctgcaatgtagccttctaagagagtccatccctacagcatgtccacaggcagtgtgaggcttcaggggtcccctggcagctggcagcactgaagaatgagttcaagcttgaaaattgactgctaatcacagcaacaataaaactattattttttaaaaatctgataacattctagattcatcattttttgccccagtttgttccttggtggtgatattcaccttaagcctcagggtctagagaaaagagaaggtctctcaggaattttagcattagggtaaatcttacaaatggacatttgccagagagtgtagggagcatttggaagcctggcagcagggctgagaggatgagagggataggagagagaagtgagagaggaggcacatactccagggagggcctgggaatgtgctgcatagcagaggcaggaagggtacacagagagagtggacaggttcttgtctggaaacccagagacacagagcacaagatgggtagccagagccggggtttcgccatattgcccaggctggtctccaactcctggcctcaagccatccacccacctcgaccaaactgctgggattacaggtgtgattcacgacgccggcctttttattaatttttaaaccactttttcttcaaatttggactggaaagtgagatgagtcactgagctggccttttgattaattgttttatggaatgcttcatgaatttgggtgttatttaaaccacgtttatgtcaaatttggactggaaagtgagatgtctctaggatacctagagtaaggtcttacttgacggtcgtcagaaaaacacagccaaacctcttcaatattctgttacagctgattggaaaatgctggtgttatcattgttttttctggtctcttcaaagttaaccccactttggaagcaactagagccttgtattgggagagtcctaatctacccatccgcaccactggtggttgtatagtggggacaggtgggcttggaaagtagtggagatttgaacagggctcaggccgtttgggatctcatgttgtaggactagggttcagggaggaatgacacaggctgcttgcactaatacatggtttgtttaacaatggttctgggccctggggtccctgcagaactccctgatttcagcctcctgagggctcattcagacttcttattcagatctgactctgtcaccccaggatatgtttcttacacatttcccagagctctctgtatcccagggtgggaaactctcaagttgcatccatcctcacacaacgagctgccaggatgaatggggctctgtccgtggtgctgaacatgtgcctcgctgtgtgctggtaggtagatgagttgtcaggcaaaggcagaaaacatatgaacatcagaagacaggcgtggagtgaggtgcctcccaccatccacgagtttccattactggtttccttttaagctattcattgggtaacaaatttgcttgtcatcctatatcgccaaagtcattgtagaaaacatctttcacaggcttttcacacaggctaggaagggacactcagaccatgtgtagactgtttgctgagtcaaatgtcatcctctgcctcctggttgattcttttttttttttttttttttttttttttttttgagactgagtctcgctctgtcgcccaggctggagtgcagtggcacgatctctgctcactgcaagctccgcctcccaggttcacaccattctcctgcttcagcctcccaagtagctgggactacaggcacccgccaccacacccggctaattttttggattttttagtagagacggggtttcaccatgttagccaggatggtctcgatctcctgacctcatgatccacccgcctcagcctcccaaagtgctgggattacaggcgtgagccactgggaagtttctcttcattcattcacttctttatagattgtcccttgaggtcttgtgaatccttaatttttcaagactaaatacttccttttctttcgtaacacatagtatctgattttctgggaaactttctatttgacaaaatgggactgggatgtcaacatgaattctccatggaaaggctgatctcactgatttagaatttgtggtggttcttgtggtaagatacctgaagaaaatattgctcttatgtgacattaaaaaagaaaaatgtgacacttaaggtgagtaaaatgaaggtgtgtagttctctgctccctgggcattagtatgtaggaactggatgctagaaaatctttggctttgctttcagcttttggctcggaggaggccaaagtgcacctttcttcggtcgtcccaaatccaggttcatctgacaccagccgcctccaccatgccgctgaagtttgatcccaatgagatcaaagtcatatgcctcaggtgcactgggggtgaagtcggtgccacttctgcgctggcccccaagattagccccctgggtctgtctccaaaaaaggttggtaatgacattgacaaggcaataggtgactggaagggccgtaggattacagtaaaactgaacattcaaaacagacaggcccatattgaggtggcaccttctgcctctgccctgatcatcaaagccctcaaggaaccaccaagagacagaaagaaacagaaaaacattaaacgcagtaggaatatcacttttcatgaggtcgttgacattgctcgacagatgcggcaccaatctttagccagataactctctggaaccattaaagagatccaggggactgcccagtctgtgggctgtgatgttgatggccgccaccctcatgacatcatatatgacatcaacagtggtgctgtggaatgcccagctagttaagaagcacaaaggaaaatatttcaataaaggatcatttggcaactggaaaaaaaaaaagaagaaaatctttggtttcatcttgagggaaaggcaaaagacactgccagccacttccccaacactgtctctgtagatcacgtcactactgtgaaacctaaagaactggcctttgagggatttttcagatttagcacttcagcagactcagggctgtcgcatggtcctgaggctccttgagtattgctcctgcctgttgggcttgttccacccactcggcctggctgcactcagaccacactaccacgtcagatcccacacccaccacaggcaagccgggcatggagtggtgagcggtgtgtcagcaagcgagcatgaggtctggccactgtgcacagccaagcactctggctgctttggtggagtgggcagctccatgagctggcatagatgccatctccatgcaaggccgtggctggcccagatgcaggtgcctgcagcagaagctgcatgtggtacatctggacaaggggaacatggcagtgcctggaagcttggagacaccaagaaccacagagccccaaagagggtgtcacagcctagcttgacaaacccctaggtctccagtcctcaaaaagctgcagcttttctctgcttcttgttactggtaatgtgcagagtgggaggtcatgtttcagccctgttcgtgttacagttctttcaggggctgggacctaagttctttttgcaggtagcagggaccagcctatgtgcgtgaagtgtgcaggtggaacacagagcactccacccacccaggtggatatcagaggatgggcgttcaggcactagtgaggcccaaccctctccctcagtgacatctgcgttcctaatattctttttgaacatctgaaattccaccaaattcctgcctgtcatctgggagagactccttgaggccaggtggaaatcacacccaggtgtcaccaggataatgattcaatctcttctgcacttattccagagggcaagcccacgacaggatgaaatcccaatgctctcctgtgtgccacgttccagaagctcaggttccccagcagcacctggggttgtgggaaagtctttcctgaggccagcctggggcatctgggatcaggggctgcttgcctttctggaggggctcagctcaggactgagggggattctgggctggaacaggagtgcctgagtcccgtccagatggtgtctatgagctgcagggggccctcatgccaggttctttcttacatagaggaaactagggtgacaaaatgtgaccaatgggagttggagtttactcttatttccaaggaagccatgagagtcctgtgaccctggaaagagatggggtccccaataactagggacatggcagtgagtggtgcagcccggcttcctgtcctcaaagagtttcaggcccactgtccctggacagtgacaacccagagtgggcagctctgggatgggggacagacacaggctgcttctttgggaattttgatatggggttttagtggcccctgctgcttgctgggaaaattccccaccttggaattgtaatcgatttcaggagaaatgacacacagttgctcatggatataaaataaattttataaccaaaatagaacccagtgtcagcactccccaagaagaaggattcaggcttggtccagtgtgaagcaagtgggcacttaggcaggtggctttgcctattttttgtgcatgggcccatggtgagggttgctgcatgtgggctgggttttgaggggttcgaatgtctttctgctgtgcagagagggagcacatgctctgcccagatgtgcagtggatgtgactaaggactggaaagctgataatctccaaaactgaatgttcttgccatacagggagatgaaagggctgctagaaaatagcttatctaaccctttgagaaaatgtaaagaaaaggttccaacccaggtgtgtgtgaccgcaaagtctcaggattgctgagacaggggcttttgcatccacggagccccgggttggtcccgctgccctccctcccactcagcctgtgactccctggctctgtcatcatctccctctgctgatttctcttcccagcctgactcagctgccctgagagatcaggaccaaggccaaggacggccagctgggctcctccctccccagagacgccaacccaaccctgccctgaggaatgtgcttctccttggcactggctggtctccagacctaaattcaaccctctttttagcaggctgaatgccaagcccaatctcagcgcccccaggaaggacctaggactgaggctgtgagctctcaacttgtttttttggggcaacaggccagggcagctagccagtgattttaggaaagacgaggtgaacctgtgctcagaggattttttcctcccagtgtttagtaactgtttggctgtgactcactaggaaaagctcatatcacattatttatggcttacacacagcccaaaagaaagtttaattaaacagacgaataagatactgtagcgtgcacattcctctattctttactgatgctagtttaatatctaagatacccatggtgacaaataaattggttcacaacctgaagaagtgtcacaatccccatgttggagatcactgctctaccctgcagctgcaggacaggggaggccagaagtgagagtgagaaatggggtcggggatgtgagtgcttatctcatccacccatgagagcgagtgggcctgcaggactctggaaattgcatgagtatttctgctccatcagcctcctgcctggtctcctgctcccatctcaatcctcccaaccagcctcctcccaacagaaggacacacggactttcctgaatcacaatctgatcacttatatttcctgcttagggcctgcctgtagctcgggtgcactgagaagaaagaccatttctcaccgaggctcataaggggaggtggacaggggaagcgatgggtatggtgggagcttccatggcctccttggactccagatcctttcagcacctccatgtgttcagcagccaggaagttcaattcttcttgttcaggagtttttaggctgggcatggtggctcacacctgtaatcccagcacgttgggaggctaaggcgggtggatcacctgaggtcaagagttcaagaccaccctggccatcatggggaaacctcatctctactaaaaaatacaaaaattagccgggcgtggtggcaggcacctgtaatcccagctactcgggaggctcaggcagggagaattgcttgaacctgggagggggaggttgcagtgagccaagatcgtgccactgcactccagactgggtgacagagcaaaactctgtctcaaaaaaaaaaaagtttttatactttggtctttatcgcctccccatcatcacctttcttggaggttagtgggtgacaccgaaggttccttccctctaatcctcagatcttttggtctttcttctggtgactgccgtgatgctgaggctacctggagaccctaccctaagtcatatttttagcatgagctaatgctgtgtgatctgaaagaggctcattaggaataacaaaagacactcctgtcactcaggatgttccaagttcagcatcataataggaagagggccaaagaacacacattttcatattacagcacacctggtaagccatgggttcatcagactggaccccccttactctgccaaatttgcagcactcatgagttaccaatcccaagggaggactcccactgcagggaggatggcaaaggtcaccactgcgctaaccacccggaataggggtctgaacacttcagccaccgcatcttgggctgcactctgactacactgagcgtggtgaacagaacacccacagccacagccagttcgacaaagcaggttaattacttacagacaggcagcgagggacagcggaagcctaggctgcatgactcactggtcccccgaggctcaggagcacggcccagggcagatagagtctcccgtgcttgccccacttgcaccacagctgaggactcagcagtgagctctgggttttatatgtggtggacacgtcctgggctagtgttacaggagaccccctctggaagggatgggaatgaggccagggctgtcctgggcagtttctctgtagctcaagttgttgcattctctgggaagaatagaaacgaagcccgggcactttcaggcagttcctcctttcttaggatggtgcattctgatatagtttggctctgtgtccccacacaactcttctctcaaattgtaatccccatgtgtcagggaaggggcctggtgggaggtgactggatcatgggggcaatttctctattgttgttctcatgatagtggtcgagttctcacgagatctgatggcttaaaagtgtgtggcagttccctgctccctctctttctctcctgccatcatggaagatgtgccttgccttcccttcaccctctgccatgattgtacatttcctgagacctccttagtcatgaaaaactgaatcaattaaacctcattcctctataaattatccagtttcaggtcattctttatagcaccatgaaaatgaactaacacgcacttctagtgcattctacagtgattctgggaactctgggcaagaagaaaggtgggaaagccagagccatccaatgattgtctcctggtgccctcctccaggaagccatttctggtgccctgggcactgctcccagccttgctcatcctgggtcatcactgtttggagaggtgtctctgtcctccctggactatgaaaaccaggagggcaggacctggaactaagtcacaactgtggccatagaatccactagcacagaggaagtgcacagggtgtattaaatgaatgaatgaaaaaagtgaattgacgatgaaagccctatgttcagggtgtgtctcactcaacctgtctgtcctgtcatggtgacttggtgagacttgttgcctgcaggtctccaaacctccctgtcttccagacagccccagggcttccctgtgaagctgcttctcagctgtgccctacagagtcagatgcatgggggacgctctaaagctggactccacagcccaccttttccccgcttagccctcctaacacaggacacagccacatgcagggctgcaggagcccaggctgccaacagcatcaaccacctgctaggagagggtagggacgggtgagactcagagccttccagcttactacgtttataaatcccttggctgaaactactaggaaaaatagttgtgacttcatcacgtgggttacacacaatcacaaagaaaagggaaagcaaaaattgacaagagtgtgtcagcctccctaaagggaacatctccaaatttggatcccaaatgacttttttcagaggaaccctccttccttctcctcagaacaagcacattcattcacacaggaaggagattaaattcctgtagagcagaggaggaaaaaccttttcacagaggaggttctgtggtcttaactgtcctggggtcataatgtatttgagagtctggaaataattataaagttttttgctcagattatcacggacaattgcgaaatattgtgaaatgccactgaattgcacacttgaaaacacacacacatacacacatgaaaagttaagcaaaaatgtgtatttaactggtggagagtgttggcgggagaacaaaaagaactgtccagacctctggtgctgaatggtctgctctggttcaactaaaaataaagccttcgatcaatttggtcactgaaaagacttgttcacttcctgctgatgatcagaaaccacagcagagacctgatttttgggtgtctgccttaacagaaaagccacaaagaactgtggtgagggcatggcagatgacaaccacagtgctatcaggaggtaacaggtgactgacctcagccttgatgctcgagaagatttcagaggatgggtgacatttaagtaaaagaagaagaatgaagaaggatggggtattgggtgcagaagcaggggtgacgctgtggctctcccaattagctgtgttaagccaagggcagtgagaaccagggagggtgtgcaggatgtgggtgtggacacttggaatccagcctacatcttcaggaccttctgcctgcagaggctggaagcttcacactttccttcccagaggaccttgtagctggggttctggatgcatttgaatctctgggcagcgcagccattgtgtctctcggtgtagccacaggaacatctcatgtccaggtgatggccctgaattgctgagacactattctagccacagaactggcatccggatcttaattgttctagcttcattcctggtggcaaaccctggggcctctcctccagcccctcctatgacatggaggctcttaattcactggtctgcatcatacgaaggatcctgccagagcagggatcaggctttggtcaacagaaaccccccttgcagggagcttctgaaatcccaacattgtgtttggagaaaatgactcacacagacccgtccttgtcagccagcagcagaggggcctccggcctggggaaacccggccttccttctacatacctgcacacctgaaattccacctcattcccacctgtttcctagcagggcttccctgagggcagatggaaaggccactccaaagctgccaggagggagattcctattttttcctggcgtaaaagggcaagcagtgggggagctgctgacagcgggaaatgccagcgtcctccggggtttcacattccagaagccaagatctgccagccctgcccgggagccctgggaacatcagacctgggtgtcttccaggagtgtctgtgaacagagccttcctgcccttcccagaggggccaggcctagggagtttggcagcccttgggtaggaggtcaggagacctgggtcctggcccagcctgtgtcactgacaaccagcagcagaacctcagcccgtgtcctgcttggatccaggaagtgggtgagagaatgatggtgatggtcgtttgaggtcagggtttacatttactgtccagacacctgggatcttctccagacacttgaggacaggcttccactgggaaatcctggtcccacctcacacatctgggtccccaggcagaagacagacccatgcccagacgtggacgctccagagtgggcatgttaggaagggggactccgagggattggtggcgggattggacatggctgtgtgcacagactcttctgacaccttaggaaggtgcagggacagggtttgaacgcagggctgactgaccctaaagcctcctcatgtctaattgggggctcttagtgtccagggagccctggacgggtgcccactggcctcacactgtcccagcctccgaggcctccatgatctgctaaaatctccctctaccttccagatgctgcattgactcagctgctctgagaggccaggaaggagcagctggactcctccctcctcagaggtgcccaccttgcccctgccctggggaaggtgctccactctctcactctggctcatatgcaggcagccttgcctcttcttggtagagacagtaagaccagtgcagggctccactgcagcctcccagaaaatgcctggaaccaaggacctgagaactctacccctttatggaagacatcaaaggggagacatgtcagtggctcttagagaagaaggagatgatcctggaggcttctgtgctcccaagtgtcctcaccatttggctgtgactccctccagaaactagatatctagttctagatatgtgctatgctatcatataataatatcatacgatagaacaatataataatattctatcattacttggaatatacacagtcccaataagagggtcctaaacaggctgggcgcagtggctcacacctgtaatcacagcactttgggaggctgaggtgagcagatcacttgcggtcagaagttcaagaccagcctggcaaatacggtaaaaccccatctctatggagaatacacaaattagccgggtgtgttggcgggcatctgtaatcccagctactcagagactgaggcaggagaatcacttgaacctggcaggcagaggttgcagtgagccaagatcgtgcaactgcactccagcctgggcaactgaacaaggcttcatctcaaaaaaataaataattttttttaaagtgtcataaacagttgagcacagcattctgttgaatgcacactgtcccattttctaacccatttcttcacttaaaaataacattgtttatgcccaagtaaattgattttccatgctactagcacatcctaatctgtgtcctagaaaacactgctgtaccccacagcagcaaggaacagaggccaagggagcagacagggagatggtgctggaagcagggtctgctctgtcgagggagaaggtgggtgctgagcactctggtatttattgaagtcatttctctgcagcctcttcctgtgtctcctgcctccagagagaagcccctatccgtgctccccaggaacacagatgcaggatcttccacacacacaaatctaaccacatccatgccctgctaggagccagccatggtgcctagagggtgacaggtcaccttgcctggcccggaggagaacggcttgtccatgccatgtgtggcctgtgagcttgagcggaggaattcctgcagaagctgggcaggggtaggggggcacagaactgacccaaaacagctccttcccctctgtcctcacatcctgaccccaagatggctcttctcagggaaaatcacaacccaaccctctgaaaaagcacattaaggaaaaacacctttgagaatctcagggggggatgtggaatttctccaccagaacttcacagtgataatgacaccaaacacaagaacgacaataaccaaaatcaggagttttattctcctaccttctctctctctctctctcctctcactgtcatgaacgtcacgaagacactgactttgcgttttctactcagcactgcatcactggtgtctgacacgaagcctgggacatgtaggctcccaagtggacctgtcctgggtaaatgaccattaatgagacagagaaggagatgaagagcccccagaggagtgttgagtcccaggggtcccgccagctccactcccaccttccaaacctgtgaaagtcaggtgcctgagtcacacagtctctcccacctgaatgccatgagctgcaggtgactgagaagttactggattcttgaccatgtgtttcggttgtgaggttgggacctaatgggaccctttgaaatgatgtcatgggttagcaatgtcccaaggaaactgaggaaagtcatagctcagtaggatcctgtggaatcgctgtgtggacatgtgagtgtcggagagtgttaatgccaggagcatcctgaaccttcctattttccagaggactcagtgtgggggacgattggggcacatagcacagagaaggtggagggtgtaccgcttctctcctgattacaaaggtgagatcaaagctacaatgacacgtaccctgcctggcacctctcctgcccaaggacccagcctgtctctgcaggacttgcaggagggcaggaaatgccatgacatcaccagctccactagaaatatgggataaaaggagtggctgagatctgctgatcccctcctcactccactgcaaccacccagagccatggctccccgaggctgcatcgtaggtaaggaggacaggaccccattcccacctgagcccatctccaatctcagccaccaccagggctctctccctaccccaaactacacctcatccctgttcccatgcccagccaaatctccaggcgtgaattgctcacagcaattccccatccatagtgcccagatcagccccatccacagccctgtttcagtccctgagctgctcaaagccataccgagccctggttccacccagtcttcttctaaatgtcagtgccagtcatatctgtggctgtccactcaccccatcttccctttccctttcccacagctgtctttgccattttctgcatctccaggctcctctgctcacacggagccccaggtgagcccaggagtgtttgggaagctggaggaggggtacaccttccaggggaccccaggctgggacccacctgccactacctcctggatctcaccagctctgtctcctccagtggcccccatgactccttacctgatgctgtgccagccacacaagagatgtggggacaagttctacgaccccctgcagcactgttgctatgatgatgccgtcgtgcccttggccaggacccagacgtgtggaaactgcaccttcagagtctgctttgagcagtgctgcccctggaccttcatggtgaagctgataaaccagaactgcgactcagcccggacctcggatgacaggctttgtcgcaggtgagtcctgtcccctccgtgggattgtgggtgcagggtagctgcatgcctgttctgccctgggtggagcccccattctccttgtctccctgtctctgccccctgcttctattcaatccacctctccctttccctacacctgtgtctccatccatttttatttccctctcagaatctcactctctctaccccgctgtcctctcctcctggctctcctgtcctcatttctgcccatgttcagtctcgcccccatctctggccatctctgtcccgctcagtgtctctctctgtcactatctccagtgtcagctaatggaacatcaggggaacgatgactcctggattctccttcctgggtgggcctggagaaagaggctggtgttacctgagatctgggatgctgagtggctgtttgggggccagagaaacacacactcaactgcccacttcattctgtgacctgtctgaggcccaccctgcagctgccctgaggaggcccacaggtccccttctagaattctggacagcatgagatgcgtgtgctgatgggggcccagggactctgaaccctcctgatgacccctatggccaacatcaacccggcaccaccccaaggctggctggggaacccttcacccttctgtgagattttccatcatctcaagttctcttctatccaggagcaaagcacaggatcataataaatttatgtactttataaatgaatgctgtagaattcatgaattagagagcttggactgttgaaaggggtcacagagggtgacgtggggccccttctctctgtcaccctgaggcatctgggcctttccatttgttctgttcgtgcacacacttattttctctttttccatttatttttaaatttattattttgttatttgtgctcggtgactaggaccctggccgcacctgggacaggggccaccctcctacaccagcctccaccaccccatggctccctgaacccagtcacaacatcgggagcagcccaggtggggtggggaggaggtggggatcgcgagagggcttcggagaggcactccctctcccaccagttctgggacagaacaggacccggctgtttgttcttgatgtacgttaaggagatgcagacagactgggaaagaacggaggttctttctccaactggctatggggagaaggtcagagtagcttaccagaccaactcaaagctacaaacttctttttctagtgcttatatgcattctaagctccacgcctatgtgcggagtgcacctgcaagacagcgtgtttcattcttatcaatatctaatctttaactagtgtccagggtctggaaagctttctccagagtcttggaaagtttcttaatcttaaatggaccccagtatgaggaatatgtggaagaatgctattattatttgatcagattttagggtctgagaaaacccagctggggttttaatgggcttgttttctcattcccgccctcatccccaggcactagtttatccagttctataatgtttaaggtatgcattcatcaaaaataaagtttagtggaaactgactcttctggtcgctaacagaaacctgatctgccacacacccatcccaggcacgcgtcccctgggatcgtggaaaacccactgggcaggtccaacgcccagagatgccacacttagtctgactttgggccaaagctggagcctgagagggagtgggtggggcggggtgtggaggatgtgggctatggaggagccctcgggtttggaaggaggaagcaaaggctggccaaggcacctgaagcacattcttcaggccctgtgccagggacaaaccctcgtggccagtgctgatgtggaatagatcgcagggagggggccacgctgctgcttacccaacccagaagcaggttccttagggagcgttcagccctagggtctccaccaacctggattccccaaagtcaaagaagccaccacctttctgggtcctgtttctcagggccagggggtctgcacagggcctgcgtccctgggcctcagtcatccgaggccaacccaggctcccggactgcccgatggcttccctgggcagattctgactcaaagggttccatcatcgccccacagttggcagcctcgcctcagtggccccagacgggcccggtggccaggtgtctgcacgtgcgggaactctggacccggcacatcaccatggcagcaatctggcatcacagggcaaatgccctgtctcacaggcctaaccctagctcagggcctatcagtgggagcacacccaatgctgggtgagctctgcctccccatgctaggattctgcagggcgtgagagctgtgctggcgcctagaaagcgacagacccaccccacccacggggtggctgcttcctcatcctccacagtgagcgtcctaaaccttcaccctgtccacatgtgactctccttgcctgcactccccccaccaccccatgaaatgatctcatttggtcatttaagtggaaaactaaaaagttttaagtgactccgtgagagcaggagagaggcgggtctcccagctcagaccccgccctggacgcccccactgaagccgcacagcaggatgtaggtgcccaaggcacctacacgcgccgagaggcctcgctcagccccgcccttcttaaacctggaatcctcaggtgtctgggtcctgccccatacaggccccctagaccactggtccagatccccaaccttcccccaacacgaggtattgacatcaaagcatcacctcatctggcacaagaatctgaaacacagaccgcaccttacaccaatgtagtgaatccctccttggatctcagtccaacaagcccagagtcggggctctgggttcccgcccaaatgccacgtgtgcgcacagaaggcacctgacgtcccttctaagggacaggaatctcaggcatcccagaatcactaggtctgatttaaatagcgtcaaataaattggaaaagaatgaaagtgctataaagttcggctgaaattttcagaggttttattggttgtatctggtggagagagtgggcaagtcttctctgaacatccatgaggacgaagaacagtcactgaggtgacggtaccaagtcaccggccacctcccagggatcctctcatccggtcctcacagcagcgctgcatggtcggacctcatcacccacattccaccaagaggaagctgaagcccggggccttcatccactcatgtcctccagacccctggcacccatcctgggccccaccccatcatccaggccttgggccttcgacctggggagagtccctgtctcctccatgagccgccctgggcctgaagaggtatccaataaacaagaaagcagaacacaaagagctgtgatggagtggatcttatgtagtaagaataaacttattttgagaaatttctgggtcatgtatttacccacagaaaaacagaagcaaacacacacacacacacacgcacacacacacacacacacaccacacaggctgtcacgtgtcctaagcacaaagtgccttgagcaaggccattgctggccccacacttatcctgactgtgatcttgctgtgatcagcacatcccatcagtgtggcaacaggtgtggccagagtgggaaccaggccttttcttcagatttgctctttgttcctgaatagccaccgtcagaacagacaccctcctagaagtcacttgattaaaaatttccttttggatatttaggttgatgttttatccatcggttaaagtataaatgtatatttattataaaagtgtaattatggctctaattaatgattatggtgaattttaataactatagctatgaaaatattccaatagataaaaacagtgctaaaatatacagttaatataagagtgattactttaagataaatcttgtaatttttgatctaataaatcttcataaaatatacatgatcatgaagcacatcaatagaattaatcctaatatttatagcaatacttggcgtgctctctctcataaaaaataacattaatagtaaaaaaaaaaaaaagaaacaaagaaatcggctgggcatggtggctcatgcctgtaatcccagtactttgggaggctgaggcaggcagatcacgaggtcaggagatcaagaccattctggctaacatggtgaaaccccgtctctactaaaaatacaaaaaaggagccgggtgtggtggcgggcgcctgtagtcccagctactcaggagctgaggcaggagaatggcatgaacccaggaggtggcgctggtagtgagctgagatcatgccactgtcctccagcctgggcaacagagtgagactccatctcaaaaaataataataataataataaagaaatgatgaaatttaaaaattctatttaattttgggttgtttaattttcatttggggcatgactatgtgaagtaataaattttgtttgggcattaatatgggatgacctatgtctcccgcaaaattcatgtgttgaagtcctaaccccagtatctctgaatataactgtatttggagataaggtctttgaaaaggcgattacggtaaaatgaggtcatatgagcaggacctaatccaagctgactggtgtccctataagaagaggatattagggcacagacacacacacagaggccatgtgaagacacagggaggagttggccatggataagccaagagatagaccctcagaagaaaccatcctgccaacaccttgatctcatacttctggcttccagaactgtgaggaactgaatttctcctgttcaagccacccctctggtgcccttgattatggcagtcctgggggattaacacaggcagaaggaaaatgaaggatgcaagagtcagagaaaggaagaaatcaaatgtactttctcctcatacaattttcaaaatttcagttactttaggaaaacactttttgggaaattattctaaactgggtgtttggcgttttattctaaactaggtgtttagtgactagatactttcttttctttcataacacatggtatctgattttctgggaaactttctatttgacaagtgtgtgatcagggatctctacatgaattctccacagaaagactgatctcatggatctagaatttgcagtggttcttgtgattagatacctgaaggaaatattgctcttatgtgacattaaagaagaaaaatatgacacttacggcaagtaaaaagacggcgtgtggttctatacgcttgtctggggcttttattgtctgcaccctttggcctttttgagttgccagcttctccaggtcctccagcttctcatgagttgcatctaggatatatgaggcaaaaaagaaaactcagggaaactccctgctctgccatttctgtggtcccaaggtcctcccttcgtctgccttcttaccctacctttctgagtcttcttatgcttgttttatagctgtactgagcaggagagatatggaaacatatgcctacctcgtctttctggaagcagaattccactcctactgaagggttttggtaagaacacatttgccagatcaataattgcctaccaaggatcaaacactgttttgatttgccccaataaagatacaacatctggcacagcatctgtggttggggcacagtctagctctggttttgaaaacttacaaatacctgcccttgtctgtgatacagtttggatgtttgtcccctccaactctcatgttaaaatgtgatctccaatgttggaggtgaggcctggggaggtgttttggtcatgggaggagattcctcacaaatggcttggtgccctccccatagtaataagtgagttctcaccctgttggtttgtgcaagagctggtaacaagagtctgacatttctcttgctccctgtcttgccatgtgacatgcctgctcttcctttgccttctgccataattgtaagcttcctgaggccctcactagaagcagatgcaggcaccatgcttcctgtatacagcttatagaaccacgagccaattaaatctcttttctttataaattacccagccttggtatttctttctagcaatgcaaatggactaatgtagtcgctttatgaggggtcagaacgtgaattgcatgaggacatgatgatagtgcccattatccctgaatttttcacatcatgcaattcaccttctgggccccatataggggaagtgattctggaaaatgtggttcccatctcagaagggagtgggtgttggggacaaggtgataatagaaagtctagcacagtccaccccattcaaagataagcatgtattgacacccattatagccattttcaacttcaaaataaaggcagcaacaataccattttccaagtaatgtgatgcaactatcagttttaccacccaaagacttttaatcttctctagagaagaggggtttgaaaatgcattgtccatctcccagatgattaacaacctctcttactatttcatactgtaaataccaagaatcaaacaatataaaccaatacttgatagaggagtatgaaggcattgagacaaacagcaacggaatcagttaacatagaaaatattcacataggccaggcatgttggctcatgtctgtaatcccagcactttgggaggccaaggcagaaggatcgcttgagtccaggagttcgagaccaacctgggcaacacggtgaaaccccatctctccaaaaaataaaaaaagaaattagccaggcatggtggtacacgcctgtagtcccagctactcagggggctgaggcgggtggatcacttgagcctcgaaggtaaaggttgcagtgagccgagatcacgcctctgcactcctgtctgcatgacagagtgagaccctgtctgaaaaaaagaaaaaaataaataaaatatgttcacctcaaagtgaggaagattatataaaagtccaacttagtccttgtttcagcagctggcctagaggctaaagctggcatttaaaaatttcctctttcaagccagacacagtggcacatgcttgtaattcccacgactcaggtggctgaggtaggaggctcacttgagttcaggatttcaagaccagcctgggcaacatagcaaaactccacccgaaaaaaaaatgtttttcactccattctataatctctttgctctcagcaaccacctcatctgattgtgattttttttttttgttttttaatgactatattgtcttctcttcatccttacatgaatcaccctctccctctctccccgaaaaaatcaatcattccattgttagaatgcagtttagggtctataaactccaaactcagtacataattaaaatttatatttgcactttgggaggccgaggtgggcggatcacgaggtcatgagatcgagaccatcttggccaacatggtgaaaccccatctctactaaaaatacaaaaattagctgggcatggtggcacgtgcctgtagtcccagctattcgggaggctgaggcaggagaatcgcttgaacctgggaggcggaggttgcagtgagccgagatcgagccactgctctccagcctgggtgacagagcgagactccatctcaaaaaaaaaaaaatgtatattcattgggaccttgaactcagtcttcaagttttacatgcagtaccattagtttaagttcagttgattcactgtctttctgtctccttccacaaaccaacctcttgcatcagatgttctccttaacttgcttagagtgctgccattttttgaatttttttccactttatcacctgaaacctcatttccatcttaagtaggcctcccatgcattgtctaagtatctccctagtaattcccaacattttcttgtcccaactgcagcctagttctctctttaatagaattgttttacatccctctcttgttgtagatatgatttctctacaactccatatatgaaaaagataaggtgaatagaggatattgtgagcaactcagtttcccttgccacttcccagattggtagtccaaccccttctctgtgtctattccctccagccatgctattctttatttattcttgtggcctccttgtatattcacagaggactttgctttgctctggttgtgatttttaacctggtgaaattacccacgtcttcattcttgaagtatatatgccattaggagtcttttctgtaatgaattgttatagttttcccatgttttactatgggacgtgggagttctaagaggcatcccacagaatgccttgtgtgagtggtatagttatactctcttctgcccattgtgtggtagctacccaattccccccttgataatcaggacaatttgccacttttggccattaggctttacacaatttcttctaccttagactatataaccattcaattagagccaggttaatgccttctacttccaaagtccacatctctggagtcaacagcaagaacattccctgccaaggactactccagatttctgcatgcttaacccaaagcaaaaataagaccttttgaattaagggtgtttatatcattaatcttcatcatatgcaatgttgagttttttttgcaaagcagattcctggttaaattttttcagagcatcaaattccttctggtgtaacaatatattatttgcaccaattttacctgtatagcaactacttttcattcttatcttataaaacttatcatttggtaaaaaaaaattctcacttttcctgaatttcctgttggttccttgtaatatcttccatctaggtctttcaacagggtgagtttcatattgataaggagttcaggaagggagttatcgaaagataaagtaagtgcactggcattttctccttgagaggctgggtaagtcaacaatagattagacctatggaatatgagaaacagcaggctgtccctacaaggtgggagactgttgacagctatgctgagcctaaggaaaagaagacagccatgaactgtgttcagaattaatttgccccgacagaaaatagaggcagggaaaatcaagatacagtactctggaatgtgcatttccatgtcattctcatgaatggtacagtctaactaagttcagtcattttctcagtacaaattctgattcttgctctctctggttgcatctacttggcgagctgccctgggcatgtcgtttagctatctctatttcgttttcatacctcccatacagtgccatggagtccttgtgtctcccttgtggccacacagaatgttcagacaatgagcttaatcacttgatttctactacttaaacagacaactcttgaaatcaatttggaatgttttttgctccaccaagtattgcaagacgttagcaaagatctcagctaggtgccctttattagaaagccatcatacaaatatttgaaaagattcaattctggcaattctggggagtcgtctccattttacagctgcttctctttacttggggaaggtataagtaaattacaccttccccgagcatctcagggagacactcaggggaatcccctctggcttccccgactctgtgttatcagttaagaagcgcatgaacattattatgcattgtgtaatgatatggtttcactgtgtccccaccaaaatctcatcttgaattgtagctccaataactcccacatgttgtaggagggacccggtgggagatcattgaatccttggggcagtttccccatataagacttattcttgcggtagtgaataagtctcgcgagatctgatggctttatacgtggtttcccctttctctcggctctttctctctttgcctgccaccacctaagacatacctttgctcttccttcgtcttccaccatgactgtgcggcctccccagccatgtggaactgtgagtccattaaacccctttcctttataaattaccctggtctcagctatgtctttattagcagcatgggaacagactaatacgtgtaatattgctatcggcatttatctaacaatgatatagctctaagcaggtgttctgtgttcttactacacactattttcgctacagtgaagctgtatacctgttgattccccatctggcccattgcagccagatttttctaccactggcaggctacaccttggctcactacaagtcaatgtgttttgtatttttctctagccatatatggtttcaaagatgtaggaagagtataggtggagaactggatttagataaggctgtggttttcctaaatgagtcttaccaaacagtggggagacaaaggacaatggaaatcagcaggctgtaattataatgattaagcaaggaatctaaggtagataaacaagtgttatgaaagccgtcttgaatcagaagtcaggctggtcgcggtggctcatgcttataatcccagcactttgggaggccaaggcaggtggattacttgaggtcaggagtttgagaccagcctggccgacatggtgaaaccccgtctctacaaaaatacaaaaactagctgggcatggtgacatgtgcctgtaatcacagctacttgggaggatgaggcaggagaatcacttgaacccaggaggtagaggttgcagtgagccgggatggaaccactgaactccagcctgggcaagggacccagactccatctcaaaaaaaaaaaaaaaaaaaaaatggccgggcgcagtggctcacgcctgtaatcccagcactttgggaggctgaggcgggtggatcacgaggtcaggagatcgagatcatcttggccaacatggtaaaaccctgtctctactgaaatacaaaaaattagctgggcgtggtggcgcatgcttgtagtcccagctgctcgggaggctgaggcaggagaatcgcttgaacccaggaggtggaggttgcagtgagctgagattgcgccatagcactccagcctggtgacagagcaagactccatcaaaaaaaaaaaaaaaaaaaaaaaagccgtcttcaatcagaagtcacatatgaagagataagaattcaaaacatcttagaattcacattccaaatagcttaaatggaactgggttattaagaaagagggctagaaacataaaatgtactaatgaactcatctaaataaaggaataatgtggttaacaaggcaggctatttcaataaaaaacaattgcctgaatggccaaatctgttgcctgggcaacagagcaagaccgtgtctcaaaaaacaaagcaagcaaacaaaacaagacctactcaagcccaatcctatctctaaaacaattctgtgcccctattctctccttgccagtcttccttatcttccttcctccttcctaatcaccttaatcttaatcatggttaatctttaacagctgctccatccttttcccaaccggtaaacttcaccacattcttagaatcctaaacgacgttccccccattcctatttttctgagagtttttatcatgaatgggtgttaaattttgtcagatgcttcttcagcatcaattgatgtggtcatgttatttttcttcttttgcgtgttaatacggtgcattccattgatagtgatttttgaaatattctgccaggcctacattctagaataaagcctaatagtcatggtgtgtaattattttttatattgctgaatttcatttacaaatattttgtcaagaatttatttttcttttttttaaaaatggagtctccctctcgcccaggctggagtgcagtgatgtgatctcggctcactgcaacttccgcctcttgagttcaagcgattctcctgcctcagcctcgtgagtagctgggattacaggcgtgcaccaccacacccagctaattttttgtattttcagtagagatgaggtttcaccatgttggccaggctggtctcaaactcctgacctcaggtgatctgcccgccttggcctcccaaagtgctgggattacaggcgtgagccaccgtgcccaaccaaggatttttgtatgagggatactcatctatagttttattgcttggttgttgtcattgttctttgtctttttatggttttggtaacagagtaatttgatttcacaaaataaattgggaagtattccttcctattctattctctggatgagatggtacagaactggtgttaatttccctttaaacatttggtagatcctcaagtcgaccatctgggcttggagatttcttttttaggaaatattttaaattctaaattcaatttccttaatagttataaggctactaaaatgatatatttcatattgggtgtgttgtgctcatttgtgcttttaagtgggtggtccatttaatctaagttgtccaattgtgtagagttattcctagttttccattattaatcttttagtgtctgcaaaacctatagtgctatctcctgtctcattattgatattgataatttgtgtcttctgtttttgatagttttgccaaaaatttatacattattgatattttgaaagaattaactctttatttcattgattttctatactgtttttctgttttcaattttcatgacccctgctttcctctttattatttccttccttctccttgctttggtttattttgctctcttatttttttctaggttcttgctgtgggagcttagattattgatttttcctttccttccttccttctttcctttctttccttttctttcctttcctttcctttccttttctttcctttcctttcctttcctttcctttccttttctttcctttcctttcctttcctttcctttcctttcctttcctttcctttcctttcctttccttttctttcctttccttgtcttgtcttttcttttctcttcttttctttttttcttggagtttcactcttgtcgcccattctggagtgtagtggcacgatgcaacctccgcctcttgggttccagcaattctcctgcctcagcctcccgagtacctgggactacaagcacccgccaccatgcccggctaatttttgtatttttggtagagatggggtttcaccatgttggccaggctggtcttgaactcctgatcccaggtgatccacctgccttggcctcccaaagtgcagggattacagtcttgagccactgtgccttacctgattgttccttttttctaatacaactatttagtgcaataagtttcacacttagcactgctttatatatgttccacaaattttgatatattgtattttcatttcattaagttaaatatacttttaaaaatctttgagactcatctttaaaccatgagttatttagagttgtgttgcttagcttccaagtgcttggagatctttctgtaatcgttagtttgatcaaattatggtcagagaacacactctgttaaatttcaaaattttagaacttgttgaggtttgttttatggctctagatagaagtcaattctccattaccatttacaatgacatcaaaaataacaaatacctagaattaaatctaaagaaaggtgagagacctctacaaaactctgctgaaagatgttagagaagacctaaacaaatgggaaataaaccatatttatgctttggaagactcaatgtaataaagatgtcaatgttccccaaattgatctatatattcaaggcaaactcaacaaatattacagcaagattttgtataagttaacaaactgattctaaaatttatcagaaaatgatggccaggtgtggtggctcacacatgtaatcctagcactttgggaggccatggcaggaggatcacttgagcccaggagttcaagactagcctgggcaacacagtgacaccctgactctacttgcacaaatttaaaaaaaaaggatcagaaaatgaaaatgacagaaaatgaaaatgacaatacaatattgaagaaactaaacaaagttataggacttacactaacagatcaggaatttttatgaaattataataatttagggtgtggtattgtataaggtaaacaaatttatcaatggaaaaaaacagagttcagacacagatccacacatagacaatcagtgatttgtgacaaatgtaccactacaactcaccaggcagacattagtccttttaatagatatctatatggggggaatgtatcttgacccttatgtcacaccaaatgtgaaaattaatttgaaatggatcatagacttaaaagcaaaagatttcaaactataaagcaggatttccaaaagccagtgtgaagagcatgggcgccctcctcccagcaaaacaaccatttaactggtgaaaaaaaatttttaataaaaacaactaattaagtctctggaaattgtccttagggcatatcgcaaacgaagaaatgtttattcaagaaattctgttagccaggtgcggtggctcacacctgtaatcccaacactttgggaggctgaggagagcagatcacctgaggtcgggagttcgagaccagcctgaccaacatggagaaaccccgtttctactaaaaatacaaaattagccgggtgtggtggcgcatgcctgtaatcccagctacttcggaggctgaggcaggagaatcccttgaaccttggaggcagaggttgcagtgagccaagatcacgccacagcactccagcctgatgacagagcaagactctgtctcaaaaaaaaaaaaaaaaaaaaagaaagaaagaaaaagaaaaagacattatactcaatctgtaaacagcagcaagagtctgagggcatttaagccacacattactcctattccccacatccccagccaactctgtaattgaagctctattatggtcagtcacagtcaagaaaatgggactccacctctccccagctcccagcctagggctacagtttcagttcagaaagggcagtgcaccagcatcttttatcctgctgtctccatgttgcggatgtgctatattagttagaaattgtggcttgcagcaccggggctccttctcccatccagcccctcctcctagcgtggaagttccacgccaggtttagcaggtcaagcacactgggcttcactgatcctgcctgagttcactcatggggcagaggttccacacaagaaagggcaaaccgagaagacgaacagctaccaccccctcccagtgttctagctgtagaggaaagacatcaccgcaggagaagctagctgctgtccctgacaccagctccagtccagcggctcagtggttctgcccgggggagagggaggccatcagaacagagagctccacaagtatccctaaaactggctttacttgaaataagagtgtggagaagttgatgcttaatgacattgaaaaaataaaaaaggaaattttggtgctgaaaaaccaaaaaagggcttgcagtagcaacaacaaacaaaaagacaaggcagaagcttaacagagataatcagaaaaagagataactaagaagggccctcctggagtgagagacagcctcaaaccctggcaacactctgacttggcaaagaagctagactttaatcagcccacaaaatgatttatgcattgtgctataggcctattaaaaagaatagagcaatcaattaacaataagaggagtctaacagatgcaagtgataccaacagaggcagacaagccagaagcttaacagaaacatcaaggaaaggacagtcaaaaagaggccagcttatgccataactatctggagtagttagagagacagtgcgtatgcttagggctgcaccctctggagagcactaagaaaggtataattgttcatatgtaattatgtaattattacttgtatgcatgttatataattattgcttatatgtaattgtgtaattacttataaaaacagcataatcgcttatttcttaccctttctccccttaactggttttaaaagtcatggcatgaaacaatatgtatgtaattgtattgctgggaaaaataaagaatctgatttttaaatgggcaagaggtctgaatagccatgtattaaaggaagacatacaaatagtcaacggatatatgaaaaaatgttcaacaacacttatcatcagggaaatgcaaatcaaaaccacactgagatgtcccacttcggttaaaatggcttttatcaaaaagacaaagaataacagatgctggcaaggatgcagagaaaggggaatgctcatatactggaaatgcccctccagacccagacagtaaaatttacaaaacatttagagaagaattaataccaatcattcacaaacttttcaaaaaagtcaaacagaactttccaatttactctgaggtctgtattaccctaacaccaaaatcaaagatatcacaagaaattaaaaagaaaaaactacagaccaacatctcttatgaatataaattcaaaaatcctcaacaaaatatagcaaaccaaatccagcagcatatataaagaatgatatatcagccgggcacagtggctcacacctgtaatcccagcactttgggaggccaaggtgggtggatcacggggtcgggagatcgagaccatcctggctaacatggtgaaacctcgtctctactaaaaatacaaaaaattagcccggcatggtggcacgctcctgtagtcccagctacttgggaggctgaggcaggagaattgcttgaacccgggaggtggagattgcagtgagccaagatcgtaccactgcactccagtctgggtgacagagcgagactccgaaaaaaaaaaaaaaaaaaaaacaatgatacatcatgaccaagtgggatttatcccggggatgcagttggttcaacataagaaaatcaatcaatataatataccatattactagactatagaggaagtcacgtaattctctcaaatgatattgaaagagcatttgacaaaatctacactctttcatgataaagtacaaagaacaaactaggaacagaagagagcttcctcaacctgttaaagagcatctacaataaactcatagctaacatcatacttaattgtgaaagattgaatgctctccccctaacatcaggaacaggataagtatattcactcttaccactctattcaacatagctctggaggttcaagccaggaaagttaggcaagaagagaaaatgcattcagattgagcaagatgaagtaaaatggtttctatttgcaaatgacatgatcttgtatgttaaaaatccttagggccaggtactgtagctcatgcctgtaatcccagcattttgggaggccaagtggggagaatcacttgaggccaggagtttcaagccaccctggtcaacacaatgaaaccctgtctctacaaaaacaaaaaataaacaaaattaaaaaattataagtacctgaggtgatagatagcgtaattaactggatttaatcattcaacaagttaagcctacattaaatcatcacattttacccaatgtgaataaacaattattctttgtcaatttcctaaaaaaattcctagcagaaaacgtggaagtaaatcttgatgacctcaagttaggtaatattttcttagatattacaccaaaaacacaagagacaaaaggaagaatagacctcatcaaaaattaaaaacctatgcactgcaagcatcaaggaaatgaagacaatccacataatgagagaagtgtttgcaaatcatgtatttgataagggatgagtatccagaatatattttaaaactcttacaactatataataataaaataagcaacccaattaaaacatggaaaaaatctgaataaacttttttcaaaaaggaatacaaatggccaataagcacatggaaaagatattcagcgtcattattcattaaggaaatgcaaattaaaactacacaggatatcatacgcacccacccagatgactgtaataaacaggaaaatagaaaataacaaaggttgaagaatctggagagaaatgtgagccctcatacactgctgatgggaatgtaattgatgcggctctgtggaaaacagtttgccaattcctcaaaaacttaaacagaattaccatgtggcgcagcaattccactcctacatgtacaccccaaaataattgaaaacaggttctcaagcaaatacatgtatatgtatgttcataacagcactattcacaacagcccaagtgtccatcaacagatgaatggataaatgaatgctgatacatggatacaattgaatttattcagttataaaaaggaatgaaatactaataaattctacaatggggatacaattgtagaaattgtaacaatgaaaacaataaacaaagtaaaaaaaaagaaggtgacacaaaagttcacatatggtgtgattccatttatatgaaatgtcccagataggtaaatccatacagatggaaagccgactggtagttgccaagggtgagggtagaggggaaggggaggaacagctaagtaggcatacagtggtcgggggctgtggagccaggtgactcggagctaaaaagcaattctggaagatgactgagctactcttctttcaacttgagagaggaagagaaggaaggagaggagggaaaagacagggaggggaagagaggagagtggggcagtggagggggagagagagagagagagagattgatggttgcgcaaaaagaagctagtgaacacagcaggcattgctcaccttgatggaatacacacaacaaaactctgtccaccgcctgggctgcccttacttgagcacactcctggggtagtcaggcctcactcctgggacatggagcctcactactgcctggtgctgagagcccaggggctccagtcagcagtgctggaagcagggccagaagtgcagttaggaccacagagctgggtcttgttcaaggacaggatgatccccttattacagccccaagagattgcagatctggtctccactctggagtgtcaactggcacaaccacagtccaatatctggaagagtcagagctgatgagctgacaggggacctctgggagcccccaaccctatccacagtgctataatcctccctcctctcttctccctccgctcaccacaccccttctcatctgtggtcccttctgagtctgagcccaggagttcaaaaacaaagatcagctgagagcagaaggagaatgacaatgtttctggggtcaccggatcatgatcattggggcacaagatgatgtctctgagtttctttggttgctgtaacagctcacagtggattttgggactgactctggatgtaggtcctggggactgggcttggcaggtgaggaaatgcagggagggctctggaaagggttaagcttctggaatttgcaggtggggagagagattgcaatgcagtcagagaggacacgggtgattatgaggtgggaaaccgagaattaaacagaaaagagaaaattaagtttgaagttcagaggtaccttagggataacattaggcattagctcagcttggggctggggatgacttaccgaagattctgggcaccatggtttaggcttcagagcagcagatgagagagcagcagtggaaatgggtcagtgactttacacaggagattattatagggtatgaacttacccatatttagggaggtgtgcagaaggagtggtttcttaaaaagggtggggcatgaaaagccacagaaagcataacaaaataaaagcattgacacattagtaggatgctactggacctgttccagggctgtcatgttctcagacagctcaaaactcagggcatgaaggacattttctccggtattcactgtgagaacctcatagggttcctggaggtaaaactcttagaaaagtgcagaggctccccttagactgggccccctggaatttttaattctcagattgctccaccctgagcctccaggaattcattcgttagacttcatgttttcctatcctggtactggttcccacaggggtttctggtcatgggtttctgttgcagtagttttgattctctgtatccacctgcctgtgtcaacaaatcttagggcagtggtttgccctgtgaccccactcctctaatggatataagaagaagtgttaattgtttctttgttcagtattcactttctgttaagatggagtgatgagttccaagtttcttacatgcttgactggaaactggaagtcccagagaacatttctttagagatgaggtctcactatgttgcccaggttagacttgaactcttgggctcaagtgatcctcccacatcagcctcctgagtatctgggattataagcatgtgccatagcaccggctcaaaaacctacttttaataatgttcatcctctgcaagctgagactttctttatgacccaacatatgtgtggggttcccagtttacatgatatttacaaacacgttgactttactggatgcttatacgtcctcatttcattgtgcttaaagaggaaactgtagctcagagaggttaagtacgttttgaaatgccacaactagtaatggtaaacctgggtccctaaagtcacgagagagaattatgagagtatgataggaaacttcaaaggtaccgaaggcagaaactgctaacagcattggtctctgaggagtgcaaacgagcaaatgaggggggaggtaaaaggaggggaaggagatttttatttttaattttcaaaaaccatgtgctgaaagttttatgctttgcatgcatatctctaataatttagggtgaatttgggttgggcaaatacccaggagagtgaccaatggcaagacaagacaatgagagaggtaagcgtgagtcctatgggatgcatagagtgagtccttaattctctatcagtgagggaagttggaagcagggtgggaaggttgggagaaagagaaaccctgaagggaactaagttactgggagcaggtgctggtaggtgagtcatgctgtggaagcctgtttgcactgtttcaaggagtgactctttggttggatgaaaaagggacgccgtgggtgtaggtagagaaggtgctggaggggaaggcaggcccaggtagcaaagggccttgtgggacaagctgggagcctgggtttcatcctagcggtggtggggagtcgttcaataatttttttggttttttcttttcttttcttttcttttttttttttttgagacagagttttgctcttgttgcccaggctggagtgcaatggcgccatctcggcttatcacaacctctgcctccaaggctcaagcaattctcctgcgtcagtctcccaagtagccgggattacagacatgcaccaccacacccagctaattttttttaatttttattttttgtatttttagtagagatggagtttctccatgttgatcaggctggtcttgaactcccaacctcaggtgatccaccctccttcggcctcccaaagtgctgggattacaggtgtgagccaccgcgactggccatcactcaataattttaagcagtgaaactcatgaccagatttgcattcttctaaaaccaggccccactctgtgatcctggcgtgtcttcccagacacccgggactatcacagtcaccactgcagcagggcagcgttttccagcacactattatcaccttgctcatgtgtttatttactttgcaaaaatattggtttgttagtgtcagagacaattccccatggatctcttgcttttttgctggcctggcagtgaggcattgactgtccttttgttccacactcttttcaaggatgtttgtgtagtgtactgccttggaagacagaggtaaggtttccctttagagcaaagaatacttgtttactgtcctgtataaaaataatactctcttcctccaggtcatttaggctctgataaaaccctaataatttagattctggtaaaatgctttctcttaatggcagagcttgttaagaagaacagaatactctggtgtgtttcacagcggttactttcccccttcccacttcatgccagaccatgaaggagatttttctcccatattcactgtgagaacctgatagggttcctggaggtaaaactcttagaaaaatgcagaggctccccttagactgggccccctggagtttttaattctcagactgctccgccgtgagcctccaggaattcattcattagacttcatgttttcctgtcctggtactggttcccacaggggtttctggtcatgggtttctgttgcagtagttttgattctctgtatccacctgcctgtctctcgaaatcttaagggcagtggtttgctctgtgatcccactcctctaatggatgtaagaattgttaattttctctttgttcagtattcactttctgttaagatgcagtgatgagttccaagcctcttacatgcttgactggaagctgggagtcccagagaacatttctttagagatgaggtatcactatgttgcccaggttagacttgaactctcaggctcaagtgatcctcccacatcagcctcctgagtatctgggattataggcatctgccatagcacccagctcaaaaacctacttttaataataatcatcctttggaagctgagactttctttatgacccatcatatgatcaatttagcataaatgtttaacatagacttgaaaaaaatgtatgttctaccactgatgagagagagatatttatatatttgcatatataaaattaggccaggtgtgttggctcacacctgtaatcccagcactttgggagtccgaggtgggcagatcacctgaggtcaggtgttcaagaccagcctggccaatatggtgaaacccagtctttactaaaaatacaaaaattagctgggtgtggtggtgggcacctgtaatcccagatgctcgggaggctgaggcagaagaatcacttgaacctggaaggcagaggctgcagtgagctgagacggtgccactgcactccggcctgggatattgagcgagacttcaacttaaaaaaaaaaaaaatttcttgcatttctatacactaacaatgaacaagccaaaaaggaaattaagaaaactacctcatttataataccatcaaaaagaataaagtgcttcaggccaggcatggtggctcacgcctgtaatcccagcactttggcaggctgaggcaggtggatcacttgaggtcaggagttcaagaccagcctggtcaacatggtgaaaccccgtctctactaaaaatatgaaaattagccgggcatggtgacgctcgcctgtaatcctagctactccagaggctgaggcaagagaattgcttgaacccaggagggggaggttacagtgtgccaagatcatgccactgcactccagcctgggccacagagcaagactctgtctcaaaaaataaaaataaaaaaagaataaaataattcagaataaacttaaccaagagagcaaatgacttgtatagtgcaaactacaaaacattgttgaaaaaaagtaatgaagacacaaataaatggaaagacagtctgtgttcatgggttggaagatttaatattgtaacaatgtccatactacccaaagtgatctacagcttcaaagcaatctctatcaaaatctcaatgacaattttgcagaagcagaaaaaatcctaaaattcgcatggactcttaagggaccctgaatagacaaaataattttgaaaaataaagaacaggccaggcgcggtggctcacgcctgtaatcccaacactttgggaggccaaggcaggcggatcacaaggtcaggagatcgagaccatcctggctaacacagcgaaaccctgtctttactaaaaaaaatacaaaaaattagctgggcatggtggtggccacatgtagtcccagctacttgggaggctgaggcaggagaatggtgtgaacctggaaggcggagcttgcagtgagccgagatcgcgccactgcactccaacctgggcaacagagcgagactccatctcaaaaaaaaaaaaaaaaaaatgaagttggacccttatctctaaccatacacaagaattagttcaaaaaactaatgagatccaaggcctaaatgcaaaagttaaaactataaagctcttagaagaatacatagggagaaagcttcctgacattggacttggcagatttcttggatgtgacaccaaaagtccaggcaaaatagtaaacaccaataaattgaactccatcaaagtcagaaagaagaacaaacttcagggccatgtgttgtgggcatttaccatgccctacaggaatagccacaaacttgatgattcacttttaggcaacagatctggttccttggttaaccagtccggtttctttagcttccttccttcctggaggttttcctattccgttgttaagtggggccaatgccaaaaagaaattagggcaatccctgctagagtatctatcaccttaatagatttcctactcctaccaattactcaggacgcagattctttgagaaagtttctcctccttccgagacaaaattttacacattaatatgtcttatgctacttgctgttgcacatatcactaattgaaatgatacattaatttgcataatttgctcatttctgtgccttcttctctaggccgtgagctccagggtgaaagactgaaggctcttcctccaagatcaggaacaagacaaagagacctgcttctaccactgctatttaacattgtactggaggtgctagccagaacctttagaaaaaaaaaaagaaaagaaaagaattaaaagcatccagagagaaaaggaggaggaagaagaggaggaggaggtgaaactgatgataaaaacccatccaagaatgtaaatgtgacatctgcagcaggttcaaatctaagctataagacaaacggaatccttcgtaaggactgtcatctattatgcacagagagccgaaatccattactgaaattctcttggtgagccacctgatgggcccagtgacgtactagtacacacaggagttgaaacaaaaaaaagtctggcatattctttggatgactggcagagtgtgacaccaatatggtacccagccctactatcattacaaggacttcatgaccaaaaaaataatagagaattgttttggtggttaaaacaattaaaagcatccaaattggaaaggaagaggtaaaagcatctctattcacagaaacataatcttatttatagaaaacactaaaccttccacacacacacaccccaaataaaacacctgttagaattaacaaacaaggccgggcgcagtggctcacgcctgtaatcccagcactttgagaggtcgaggtgagtgaatcacctgaggtcaggagttcaagaccagtctggccaacatggcaaaaccccgtctctactatatacaaaaaattagcggggtgtggtggtacgcacctgtaatcaaagctactcaggagatgaaggcaggaggatcgcttgaacctgggagacagaggttgcagtgagccgagattgcaccactgcactccagcctgggcgacagagtgagggtctgtctcagaaaaaaaaagaattaacaaaaaattcagcaaagttgcaaagtgtgaaattgacactcaaaactctattgcatttctacacactaacaaaccatgggcaacacagtgacctcaccctgtgtcacagggccaggtacacagaggtactgagtaaacattttagttttcattaagtggataaataaaaccaaaacctattatttaccactctcctttaacacctctctaaaagcagaaagagatacctccatgagggactttgtgacactttgggcaaaactaatgctggcactagtttggatgcatcagcgaatgctggacttctcacgttgaggattctccaggtgccctccttgggctcatttcttccatggagataaaagagaacagggttttttggggttttggttttgggtgttttttttttccagagacaaggtctcaactatgttccccaggctggatgaacttgggctcaagcaatcatctggcctctgcctccagagtagctgggactacaggcatgcaccaccaccatagccagctgttttttttttttttttttttttttttacataaatcctttctataataaacattgtccctgtgacagctagcgctcctcagtgttgtcaactaagggctcacatacgagccccatccagcctgtcatctcacatactgcatgaatccatttatacaaaatatccagaagagacaaattcgtagagatagaagactagtggttgctggaggctgagagaaggagaaaaagaggcgtgactccttcatggatacacggttcctttagggtgatgcgattgtttggaaatagtggtaatggttgcacaacattgtgaaagcactcactgcctctgacttgtacatttttagaaacttaatttgacattatgtgaattttacctcaaaaaaaaatgccattctggacataaggcagtaccagctttgccctaactcgtcttcacacagcactgcccaccttaccgccctctgcgttcttcacagtgttctaacccaactcccttcagagctctactgagatatcaccttcttagggcagcctcacataccattctctctaaaatagcatcagccatcaccctatgccttcataatatgtttcttcgtcatagaactattgccactggaactatccctatttctttcatttttggtggtttcttttttgagctagaagctcactccatcaccaaggctggagtgcaatggtacaatcatggcttgctgcagcctccatgcttgggcttaggtgatcctcctgcctcagcctcctgagtacctaggcaggtgccaccacacctagctaactttttaattttttgtagagatggggtctcactctgtttcccaggctggtgtcaaactcctggcctcaaacaatcctcccatcttggcctccccaaatcctgagattgcaggtatgggccaccatgcctggccttttatctttttaatttttgaaatgaccaatagaatttgagatgatggaattaacatcttggttcagtgctgggtcctcagatcccaaatagcagcaggcacaccgtactttctcagcaaatggctactaacttaattaaccaaactaattaaaggaggaaagtcatatgattttatacatatataattatgaataaagaatttgatgaaataccttcagcagaaatttctaatatgaaagtatgactaagtaaaataggatttttaaaacctttatacatttgaagatgtttattataaaccaccagaaatcatcatattattctccttaatatccacataagacagatatgtcttcttcaatctctattattcagtattactttggtgttgctaactatcgcaatacagtaacatgtagaaatgagttagagccgggtgtggtggctcacgcctgtaatcccagcactttggaaggctgaggtgggcagattacctgaggtcaggagttcaagaccagcctggccaacatggcaaaaccccatctctactaaaaatgcaaaaattagctaggcatggtggtggatccctgtaatcccagctactcgggaggctgagaaaggcgagtctcttgaacctgaaaggcagaagttgcagtgagccgagattgtaccattgcactccagcctgggtgacaagagcaaaactccacctcaaaaaaaaaaaaaggaaaagaaaagaaatgagcactggaagaaaagatattattatttttagacaatatgtttgtatatccagaaaacccaaaagatttgccttaaaagaagataaatggattaggaatatttaatattttgactgaatataaattaaatgtacatacatcaacagataatgttatactagcaataaccaggggaattgaaatgtaaaaaagtagagtattgcaaaaggttatgttacacaggaattaattgtatcaagaaatatgtaagatttgtggtaaggaaaccataaagtgatacttaagaacataaaactagatctaattttaaaaagtaaataaacctgggccaggcagggtggcacccaggctggagtgtaatggtgggatcttggctcactgaaacctccaactccaggctgaagcgattcttgggcctcagtctccccagagctgggattacaggctcacatcatgccctgctaatttttgtagtttttgtagagatagggtttcactatgttgcccaggctggtttcaaactcctgagctcagctgatctgcctgcctcagcctcccaaagttctggtattacgggcgtgagccactgcacctggccacttttttttttttttttttttttgagacggagtgtccctctgtcgcccaggctggaatgcagtggcgcgatctcgcacactacaagctccacctcccaggttcacaccgttctcctgcctcagcctcccgagtagctgggactacaggcacccgcaccacgcctggctaattttttgtattttttagtagagacggggtttcaccgtgttagccaggatggtcacgatctcctgacctcgtgatccgcccgcctcggcctcccaaagtgctgggatcacaggcgtgagtcaccgtgcccggccacctggccacttcttcattcttgttggctttgagtcaccagaaaaaaagtaaattctgcatccttatgtggcctattgaatctaaaattacttgttgactagtttcatcccttttcttctaatgtataatgtcacctttctcatatatcagtttgccattattagctttatctgttgatggactcctgccaggcaggagtgagcagctctgccgcacgggctggagaccccgccctcggtgctcagctgccactgcctcgtgacaacgatgctgaaagagcgaggttctgagagggaaatcaaaacagatggaggaagagaaacaagtggagggaaaaggagaggtggattgaatagaggcaaaaaaaaaaaaaaaagtaaataaacctctgggacgggaagtattaaacattttggtcattgttcccaaagccaaacaatatttacaaaaaattttcatctcaatctgcacttctaaattttgctatttttcaggaggaagctttagaaaattactttggagatgttaaagctaactgcacaaatattgtcaagtaaaacttgatagagtgtaatagggagagaagatttttttgtctcttattattattattattttgagacggagtctcgctctgtcgcccaggctggagtgcattggcgagatctcggctcactgcaagctccgcctcctgggttcaggccattctcctgcctcagcctcccgagtagctgggactacaggcggctgcaatcaagcccggctaattttttgtatttttagtagagacggggtttcaccgtgttagccaggacggtctcgatctcctgacctcgtgatccgcccgcctcagccttccaaagtgctgggattacaggcgtgagctaccgcgcccggccttttttgtctattattaaaatttgaaacaacgccattataaatgaagatgacactacctagaggtgggagggcagagacagacagacacggagaatggggactccacccagtgcagaacaagtatgcagcgccccgctcccctgcacccacaatgccatggagaggaccggatctcacctacgagaaagcctgtcacccgaggtcagggctgaggagcacttctggcctttcgtcttcaccatgagggacgcctgggagctgagggaccggggcagcactgctcgaagcgacactgaaggtgcagtttccacacttctgggtcctgcccaagggcacgacagcactgtcatagcaacagtgccgcaaggggtcgtagagcttgtccccacttcccaaatgccgctggcagagcatgaggtaagcacttatggggccactggaggagacagagctggtgaggtcagatggttggtagatgggtcccagccgggggtcccctgggggccacactcatcccccagtttcccagtccctcctgggctcacctggggctccgtgtgagcagaggagcctgaggatgcagagagaggccaagactgctgtgggagagggaaggggaagagggggtgatcgggaaaccacaggcgatccttggaagcccagcttggggaaggggggctccgagggagtttctgccctgactgagactcagggaagggctagaagctgaccttgccctgccttcctgcagacacacgctgggccctggggtgagagaggtcccagacaggggatgtgtcgtggtggatttgatgccaggtcctttgagagccaggagaggaccgatgctccctccaccctcaatctctctgtggtcaaggggtgcaggcaggactctcggaagaaatgggcctagggttcagggcaatgtggttgtttcctggttttggaggagctcagagctggggctcagctggggtcagggagggaaggggctgcgctgagactggtgttgtgctatgggtgtgactggcaccaacatttagaaaaagatggggctgggattggaactagcgctaggcaagactttggggagtagtttggggactgaaatggctgtggatggggctggcccgggggctatggatggggaattgctgtgatggagccatgtctgaggaggaggccgggcatggggacagggatgaggtgtagtttggggtggggagtgagcctcggtggtggctgagatgggagatgggctcgggtgggaatggggtcctgtcctccttacccaggacatggcctcgggagccatggctccggggtggctggaggggagtgagtgggtgatcagcaggtctcagcagctccttggctcctatactcctagaggagctggtgataccgtgggatgccctgccttcctgcagagacatgctgggccctggatcgagacaggtcccagacagggtatgtgtcatggtggatttgatgccagatcctttgagagccaggagaggaccgatgctccctccaccctcggtccctctctcctccagaatggaggcttctttggcaaataggaaattgcaggacactcctggggttgtcctcaccctcccacactcacacagccacagtcttacagctgaccctgtgagtctagagctgagacatgcaccgaaggttgctgtatgacctggtccccttctagacgtgaatcagtgcgagggcccaggacagcagaagaggtgtgaggccatcctgtgacaagggagccacagggtgtccagacccagcgggagccgaggattcaggaaaatctccccagtcagctccagaggtgcccacagtgtgagctctagtgtctcccaggtagaggccaaagcgtcacctgcccggccctgggggtggaagtggagtagacggcactcctatctgggcaaccgagtaagaccctgtctctgaagaagtacatacatttacttagactcctctgtctttgtcatatatatacatatatgacatatatgagatatacatattatatatatgatatatatatgatatacatatataaaatgtcatatatatgtgtcatatatatatgacattttatatataggagctcaagaccagcctgggcaacgtggcaaaactccacctctaccaaaacatacaaaaatgaactgggcacagtcgcacacacctgtagtcccaactactcaggaggctgaggtaagaggatgacttgaacccgggaggcagagtcgagctgagatcgcgccactacctgccagcttgggtgacagagccagactgtgtctaaaaacaaacaaacaccagaaggcagtgatttttgccccaaagtgatttaactctccctagtcattatacagaacaagaaaaataagaacatgaattagtctgggcgcagtggctcacacctgtaatcccaacactttgggaggccgaggcgggtggatcacttgaggtcaggagttcaagaccagcctggccaacatggtgaaaccccgtctccactaaaaatacaaaaattagccaggtgtgatcccagctactcgagatctgggtagctactgaggcaggagaattgcttgaatccgggatgtggaggttactgtgagctgagaacacaccactgcactccagcctgggtgacagaacgagactccatctcaaaagcaaacaacaacaacaaaagaaaaagaagaagaaagtgagttgacctgtaatgtgagaaacggaagttgtaatcatatgtgactcagatcacagtcatatcacttaaagtgctgttatggttcaagtggcttttaaataatattgattttcacagtggtcagaccacatccctaccctggttaaccccacttcatgaagcagagcgtttggagggggaggatgggaggaggagagcaggaacccaaaaccctcacgtggctgctctgctcaacaaactggaaacaccgtcaacttattttgatacaaatccctatgacccatttttattcaagaattctgtcacctttggctgtttttctgaggtttctccatagcaccttatcctaaaattttctcttttttttaattttaattttaaatttttttttttttgagacagagtgtcactgtcgtccaggctggagtgcagtggcgtgatctcagctcactgtaaccccttcctcccaggatcctcgtgccttggcctcccgagtacctgggtttacaagtgtgcaccaccacacccagctaatttttgtatttttagtagaggcggggtttcaccatgttggccaggctggtcttgagctcctgacctcaagtgatccaaaccccctcagcctctcaaagtgattacaggtgtgagccaccatgcccggccctgctcctggaattttcttacagaatcagagcagacaccattcctagaggtaggaaactatctctgcaattggctgttctggaagccagaaacaaaggaccggccaggaacccatctcccctgacaattgtggaggagcaagttgaggactttcaggatccacaatgccaggcaggagggagcagctctgccacacagggctggagaccccatcctcgatgctcagctgtcactgcctcgtgctattaagttgccacatccttgatggtttaatgcccaactccagggctgcttgctctgcctgcattggttgattcttctggaaaaataaaactctataatattttgatccagggagcccaaggaccatcttcccagctctctcgaattacgacacaatcctcgtcctaactccactagattgccctggttaatggggtaattctgtgagaaaacacaggcgcatcaatattgcagtgtcccttacagaagcgctgagagtaacactattgctttagttggggtcctcatagaacaggtgatacctcatagaattttctagtgctttccaatacctcaattgatatcattcagattcggccgggcgcagtggctcacgtctgtaatcctagcactttgggaggccaaggtgggtggatcacctgaggtcaggagttcgagaccagcccagccaatgcagtgaaaccccatctctactaaaaacacgaaatttagccaggcgtggtggtgtacacctgtaatcccagctacttgggaggctgaggcaggagaattgcttgaacccaggaggtggagtttgcagtgagccgtgatggcaccactgcactccagcctgggcgacagagacagagtgagactccatctcaacatatatgtatacacacacacatatatatctcagatcctctagtgcaaagtcacatatctgtatgggagctccaataaattggaatgcagaggttaaaggttaatcagttagctacacctactaggaactttctctgttataaggggtggtgcccaccagggactggtcccatggccagttcccacatataatctaaccctgtatgggattttagaaggtgggaaacaaagcctggcacggtgactcacgcctgtaatcccagcactttgggaggcccattcgggcagttcacttgaggtcaagagtttgaggccagcctggccaacatggtgaaacctggtctctactaaaaaaaaatacaaaaattagctggacatggtggccggtgcctgtaatcccagctactcaggagcctgaggcaggagaatctcttgaaccggagggacagaggttgcagtgagctgagattgcatcactgcactccagcctggaggccaaggcaggaggatcacttgaggccaggagtttgaaaccggcctagccaacatagcaagtccccatctcaaaacaaaaagcaaaacacaatattttgacccaggcagtgtgaagggggcaggtggcatctttttgaagatgccagaaaatttgggacctccaaacttggacaatgttagcagctgtctgaggccacaaaattaggcaaaccacactggagaaagaaaatccttcggaaacctgttcatttaggcaactgtatgagtttcagctgaattttctaaatgcctctaaattacatcctcagcctggagggacatcagagctgatttgactcacttgtggggcctgcttctgagttattaacgtggttatggctcccccatgtggtggaggggggcatattcattttttaagttcctatttcagcccagcagggtggctcacacctgtaatcccagacctttggaagacccagcgatcgctcgagcccaggagtttgagaccagcctgggcaacatggtgaaagcccgtctctatttaaaacaaaacaaaacaatgaagttcttcctatttctctccctgtccttgacacgaggggattccaactactttttctgctaatcgtccttgtacatgagcatatatactgacaggatttttacctgtcccaaataatatgcctttggtcccatccccagacaggcagggaatgaacaggccatctgtgactctcggtcttgctctgtcgcccaggctggagtgcagtggtgtgatctcagctcactgcagcctcaatcttctgggctcaaatgatcctcttgcctcacccccccaagtagctagaactataggcccgcacccccgcgcctgcctaatttttttcttttcttttctttttcatagagatgggggtctcactatgttgtgcaagctagtctccaactccaggctcaagcaatcctcccacctcagcctctcaaaatgctgggattataggcatgagccattgcgcccaacctggatgttgagttttttttttttaagaaactgccaaactgtttttcagagcaatgtataaatgatccaatttatctccacccttgccagctttcaatggcgttgcggttttcaaaatttttagccattttaatttaatttgcgtttccctaatggctaatgatgttgaacatctttttatctgcttacatgtcatctgtatctcttcctcattgagatgtctcttcatgtctttaaaaagtttttattttcatttgattttttcatagagacaaggtctcactatgttgcccaggctggtctcgaactcctgggctcaagcaatcctcccaccttggttccacaaactgctgagatgacaggtatgagccaccatgccagatcctcttcaggtcttttgcccatttttttaatggatttttttttcactattgagttttcacagttctttacattttctagataattgtcctttgtcaggtatgtgctttgcaaatattttctcccagactatagccctatctgtccttctaactgggtttgttttttgttttttgttttttggggggtttttttgagacggagtctagctctgttgcccaggctggactgcagtggcgtgatctcgacccactgcaacctccacctccagggttcaagcaattctcctgcctcagcctcccaagtagctggaactacaggcgtgcaccaccacacccagctaatttttgtatttttagtagagaaggggtttcaccacgttggcgaggatggtcttgatctcctgaccttgtgatctgcccacctcagcctcccaaagtgctgggattacagatgtgagccactgcgcctggcctaactgggtttttcttagagcaaaagtttttccttttcataacatccaaactatcaatttttctttttatggactgtgcttcagatgtcaaatctaagaactgtttgcctggccctagatcctaaagatgttcttgtatgttcgtttctaaaatttttgtagttttatgtcttacatttaaatctgtgatccattttgagttagtttttatataaggtgtgagagaggagagaggttgatttgttttgttttgttttgttattcctatggatgtccaattgctcggcaccatttgttaataagctctcttccctccattgatttccctttgcgcttttgtcaaaaatcagccgggcccaggcagagtggctcacgcctgtaatcccaacactttgggaggctgagatgggaggatcacctgaggccaggagttcgaggctgcagtaagtcatgatcactccactgccctccggcctgggcaatcctgtctcaaaaagaaaaaaagttgcacatatttgtgtgggtctatttctgagttctctattctgttcctattctattattttctctattcctctgccagtaataccacacagtcttgattactgcagctagatgtctttaaattgggtagactgactcttgtcactttattctgggttatttatttatttatttatttatttgagacagggtctcgctctgtcacccaggctggagtgcagtggtgtgatctcggctcacagcaacctccgcctcccaagttcaagcaatcctcccgtgtcagcctcccaagtagctgggattacaagcgtgcatgaccacactcagctaatttttgtagttttagtagagatggggattctccatgttggtcaggctggtctcaaactcctgacctcaagtgatccaccagcctccgcctcccaaagtgctgggattacaggcatgagccatggcacccagccaattcttcttctttcaaattgttttacactttctagttgctttgccattccataaaaaaatttaggataatctagtcgatatctaaaaaaggaattgtgttcaacctgtgtatttatttagggggaaattgacatgtttactatgctaagctttctagtccatgtacatactataccttttcattcttttagagagtatttgatttattttatcagaggcttttacttttcaggatacaagtctggtactttttttttgtttcattttgattttttctttcctttccttctttctttctttctttctttctttctttctttctttctttctttctttctttctctctctctctctctcttccttccttccttcctttctttttcttcatttttttttgacagggtctcactctgtaacccagactggagggcagtggtgccatcatggctcattacagccttcacctcccaaactcaaggaattctcccacctgagcctcctgagtagctgggaccacaggtgcatgccaccacacctggctaaattttttttttatagagatagggtctcactatgttgcccacgcttggtacatataatattggatttacacctaaatatttcattgttaagcagttgtatttggtattgattttatctttaatttagctgtttatcactgatctataccaatgcaattgattttgtatgtttatcttgtctatctcaaccatggtgagcttgcttgttagctgtaggaggttttgtggtttttctgtcttgaggttttggttttattttttgttttttggtagattccttgggattctctatgtagacaatcatgtcattgcaaataaggacaattttatttcttcctttccaatccctgtgatttttagtcatatggtaactctatgcttaattgtttgagaaaccaccagactgttttccaaagtggtagctgaaacgtttcgcattccgcaggcaatgtatgaaggctctaatttttttttttttaattgagatggagtctcgctttgtcacccaggctggagtacagtggcacaatcttggctcactgcaacctccacatcccgggttcaagcaattctcctgcctcagcctcccaagtagctgggactacaggtgcgtgccaccacacccagctaattttttttttgtatttttagtagagacagggtttcactgtttagccagggtggtctcgatctcctgacctcatgatccgcctgcctcggccttccaaagtgctgggattacaggcgtgagccgccacgcccggccagaaggctctaatttatctacatcctcatcacacttgttatcattctcactttttaattctagccagccttgtgggtgtgaagaggcatctcattgtggttttgatttgcatttccttggagactaatgatgtcaagtatattttcattgcatattggctatttgtatatctttcttgaagaaatgtcaattcagatcctttgaccatttttagttgatttatcagtcttattattgaagtgcaggagtttttttctatattctaggtacaagtcctttaggagatacatgatttgcaaataggttttcccattctgtgtgttattttcacttttttgactgtatcccttgaagcacaagtgttaattctgacgaaatgcaaattatctatttttttcttttgttgttcatgtttttggtatcgtatctaagaatactgtattttatttttttgttttgttttgagactaagtctcactctgtcaacccagactggagtgcagtggcacaatcatggctcactgcaacttccatctcccaggttccagagatcctcctgcctcagcctcctgaatagctgggagtacaccaccacacccagctaatttttatatttttagtagagacagggtttcgccatgttgcccaggctggtctcgaactcctgacctcaagtgatctgcccacctcggcctcccaaagtgctgggattacaggcataagccgacgcgcccggccttcttgtttttataagtattagtcttcagctttccatcttctgtcaggatttattaaaagactcttagatatgagacaggaggatcacttgagctcaggagttggggaccagcctgggcaacagagggagacccaatctctattttaaaaaaaaatttttttttaataaattagccaggaatgatggcatgcacatgtggtcccagctacttgggaggctgaggtgcgaggatcgcttgggcctgggagttccaagtttcagtgagccatgatcacgccactgctcagcagtctgggtggcagaaagagatcctgtctccaaaaacaacaacaacaagataaaacaacaagaaaacatttaccagttttgtacccaagcgagttagagaaacgctacacttggagacaaattcaggaatcctttattagctggcgaccgagagacggctaacgctcgaaattctctcggccccgaagaaggggcttgattttcttttatacgttggtttagagaggggagggggggaatctagctgtaacaatctttcagaagtaaaacagataaaaaattaaaaagacaaatggttacaggagaacaaagtattccaggtgcaggggctttaaattcatcataaggtgataggcgtgagggctctgccggacacaaacacgggggctttatggcactatctcctgagcgaattcctgggaactacggacattgattgccacagtaccttatcagttaattggactctctgatatgctgagagtcagcttacacgagttaactccttgaggaagggggtcggtaaggagtcctggatgtcttgcaaatgaaggagccaaatggagtccgtccggttttctcagctaagggagagtctattcatattaaaacaaggttaggtattacaccaggacaacagcaataacatgaaagcattcttttattgaataaatactattcaagttctgtatttccatggattagttaattaaatcacaaaatcaccttaagatgtcagtctcgtaagaaaactatggctcagggagagagacagaaagagattttctaagtgctgtatggcagtgtgaggagtttatctctgcagggctttggcaacaaatggaaactggttctgttcggagatgggcaaccacggatgtacgctgctcagatcttcctgtaagaaaggaagcccactggccgggcgcagtggctcacgcctgcctgttatcccagcactttgggaggccaaggtggtcagaccacaaggtcaggagatcgaaaccatcctggccaacatggtgaaaccccctctctactaaaaatacaaaaaatcagccgggtgtggtgtcacgcgcctgtagtcccagctactcgggaggctgaggcaacagaatcgcttgaacccaggaggcagaggttgcagtgagctgagatcgcaccattgcactccagcctgggggacagagcaggactccatctcaaaaaaaaaaaaaaaaaagaaagaaagaaagaaaggaagcccactgtatgagtctgttctcacacgctataaagatactacctgaggctgggtaatttataaacgaaagaggttttaattgactgacagttctgcatggctgggaggcctcaggaaacttacaatcgtgacgaaagatgaagtgggaagcaaggcacatcttacttacgtggtggcaggagagagtgaggaggggaaactcccagacactgatgaaacaaccagatctcatcagaactcactcactgtcatgagaacagcatgggggaaactgcccccttgatccagtcccctcccaccaggtccctccctcctcacctggagattacaattcaagatgagatttgggtgaggggacagagccaaaccatgtcacccacgggtcagccacagagcatagttagctttactttagctgtaatgccttcaggatctgtcatagcctgggagaccagatcgtgcacttcctggccaatgacctggacatttcttccaaacgcaggactcctcaagtggaaaatctttgttgtgaagcaccctttgaggtttgccaagattttctttcagctctgaatcatagtctgagtatttttctgcccacctcagcttctctctgtcaagcaaaactgacatatctggaaagtaagaaaataaaccaggccacatgcagtggcccatgcctgtaatctcagcactttggaaggccaaggccagaggatcatttgagtcccagggtttgagacgaccctgggcaacacaggaagaccctatctctacaaaaaatgttaaaagttaaccaggcgtggtcaagtgtgcctgtggtcccagctgcttgggaggctgaggtgggaggatcgcttgagcctgggagttgaggaccagcccagcctgggaaacagcgagaccctgtctccacaacaaacaaaataagttgggtgtagtggcacacacctgtagtctcagctacttgggaggctgaggttggagaatcgcttgagcctgggagatcaaggctgcatagagccaagattgcaccactgagctccaacctgggtgacagagcaagaccctgtctcaaaaaaaaagaagaggaagaggaagaagagagaaagaaagaaagaaggaaagaaagaaagagagaaagagagaaggagaggggaggggaggggagggagaagaagaaagttccctcatctatcaagaaactggacctgccaaagagtaacacagttgccttccctgaaatttccttaaccctagaagattaaaattcacatcacaaggccgggtgcggtggctcatgctggtaatcccacactttggaaggccgaggtgggtggatcgcctgaggtcaggagttcaagactagcctggccaacatggtgaaaccccgtgtctactaaaaatacaaaaattagccaggcgtggtggcatgcgcctgtagtcccagctactcgggaggctgaggcaggagaatcacttgaacccaggaggcggaggctgcagtgagctgagatcgcactggagattggactccagctttggcaacaagaacaaaactctgtctcaaaaaaaaaaaaaagagaaagaaaaacttacatcacagagaaaaaggctgaaaataaaacaccacaactgaaagccaggcaaactgcatcccaaaccactgtctgctctccatcttattcaactggcaaagaaaattatttactaactttcactcgcatccgtgtgaagacaccaccaaacaggctttgtgtgagcaacaaggctgtttatttcacctgggtgcaggcgggctgagtctgaaaagagagtcagcgaatgcagataggagtggggctgttttataagatttgggtatgtaaaggaaaattacagtcaaagggggaggttgttctctggctggcaggagttgggggtcacaaggtgctcaataggggagcttttgagccaggatgagccaggagaaggagtttcacaagataatgtcatcagttaaggcaggaacaggccattttcatttcttttgtggtggaatgtcatcagttaaggcaggaaccggccatctggatgtgtacgtgcaggtcacaggggatatgatggcttagcttgggctcagaggcatgacatttctgtcttcttatattaataagaaaaataaaacgaaatagggttgaagtgttggggcagtgaaaattttggggggtggtatggagagataatgggcgatgtttctcagggctgctttgagcaggattggggtggcatgggaacctagagtgggagagattaagctgaaggaagatttttgtggtaacagttgatattgtggggttgttagaagaaacatttgtcatatagaattattggtgatggcctgggtacggttttgtatgaattgaaaaaagaacggaataagacaaggagaaaaacaggtattaaaggactaagaattgggaggacctaggacatccaattagagagtgcctaaggaggttcagcatagccctgccagcaaagattatttgtttactttaagagggagttaagagtggcagtttggggatagcaccaggagatatccgctgcgatggtttggagaaacagtgtaaaccagcagtgtaaacaagagcagggcatttatgagtagttgagaacggtgagtaggagttgactagacagaagatagtaaggatgacaagttttttggggcgcagtccaagttggtctggtgtctggaatgagactggggcctaataaaaaggattgtccatacaggagttcaaatgggctgtaacctgcagcatttcgaagacaggcccgaattctgagaagggaaagtgataaaagtactgtccagtcctttttaagttggtgactgagtttggtgaggtgtgtttttaaaagaccatcagttcactgaatactaagagcctgagaaactccttgggtgatttgactaataaaggccggtctgttataggactgtatagaggtgggaaggccaaaccaaggaattatgtctgacagaagggaagaaatgaccgtggtggccttctcagaccctgtggtaaaggcatctacccatccagtgaaagtgtctacccagaccaagacgtattttagtttcctgactcggggcatgttgagtaaagctaatttgccagtcctgggtgggggcaaatcctcaagcttgatgtgtagggaagggagggggcctgaataatccctgaggagtagtagaacagcagatggaacactgagaagtgatttccttgaggatagatttccacgatggaaaggaaatgagaggttctaagaggcaggctagtggcttgtactatagcatagcctgcctttgccggtgtgtggcgattaggcctggtggaactgccatcaataaaccaagtgtgaccagggtgaggaacaggaaagaagaaatatggggaaatggggtgaatgtcaggtggatcagagagatgcagtcatgggggtcaggtgtggtatcaggaataatgtgggaggccggattgaagtccgggccaggaacaacggtaattgtgggagactcaacaaagagtgagtacagctgaaggagccggggagcagaaagtatatgtgtcaggtgtgaggaagaaaatagattttggaaattatgagaaccatagagagtgagatgagcagagtttgtgattttgagggtctctaaaagtattagggtggcagtggccgccacatgcagacatgagggctaggcaaaacagtaaggtcaagttgtttggataaaaagggtacaggacgcggtcccaattctcgtgtaagaattccgactgcacagccctgtacttcggctgtgtgtaatgaaaagggttgggatgagtcagggagagctagggtaggagcagtctctaaagctgtcttcaaggaacggaaagaggagtggggaaaggatttaggatctatggggtcagctaggtttccttttgtgagtttatataatggttttgttaggatggcaaaaccaggtatctaaagtcaaaagtatccaaccatgcctaggaaggaaaggagttgttttgtagaaggtgttggggtttgagagatcagtcggacacgattggcagggagagcatgggtgtttttatgagaattatgccaagataggtaacagatgaggaagaaatttgggcttaactgaagtaatgggggctgtctgtgaagccttgcggcagtacagcccaggtaatttgctgagcctgatgggtgtcagggtcagtccaagtgaaagcgaagagaggctgggatgaagggtgcaaaggaagagtaaagaaagcatgtttgagatccagaataatgggttgtggagggaggtattgaggataggagagtatatgggtttggcaccatggggtggataggcaaaacaatttggttgataaagcacagatcctgaactaacctgtaagccttgtctggttttaggacaggtgaaatgggggaattgtaaggggagtttataggctttaaaaggccatgctgtagcaggagagtgataacaggctttaatcctttcaaagcgtgctgtgggatgggatattggcattaagtggggtaagggtgattaggttttaatgggatggtaaggggtgcatgatgggtcgctaaggagggaggagaggtgtcctatacttgtgggttaaggtggggggatacaaggggaggatgtgaaggaggctttgaactggggaaaagggcagcaatgaggtgtggctgtagcccaggaatagtcagggaagcagataatttagttaaagtgtctcggcctaataagggaactgggcaggtggagataactaaaaggagtgctttaaagagtatcgtctaagttggcaccagagttggggagttttaagaggtttagaagcctggctgtcaatacccacaacagttatggaagcaagggaaacaggcccttggaaagaaggtaatgtggagtgggtggcctctgtattgattaagaaggggacggacttacggtgcactgtgagagttacctagagcatctgtgacggtccaggaggcttctgagatgatcgggcagtgtcagtcttcagctgctaagccgagaagatctgggaaggagtcagtcagagatccttgggccagagttctaggggctctggaagtggctgccaggtgagttgaacagtccgattttcagtggggtcccacacagatggaacagagcttgggaggaatcccaggctgtgggcattcctttgcccagtggccaaatttccagcacttgtagcaagttcctgggggaggaggttctggaggaacccctggctgctgcggttcaggcatttggagttcttgcgtgctggagatgtggctggggtttctctcacagtggaggtaaggaattgcaactcagaaatatattgttacttagctgcctatactttattattgtacacattgaaggcgaggctaattaagtcctgttgcggggtttgagggccggaatttaatttttggagttttatttaatgtcaggagcagactgggtaataaaatgtatattgagaataagacggcctcttgaccttctagggtctagggctgtaaagcatctcagggttgctgtcaaacgagccatgaactgggctgggtttttatatttcatgaaaaagagcctaaacgctatccaatttgggataaagaaaaaggaacattaacctggactatgcctttagctccagccacctttttaagaggaaattgctgggcaggtgggggagggctagtcacagaacaaaactgtaagccggaccaggtgtgaggaggggaggtgataaaaggattgtagggtaggggagcagaggctgaggaagaattgggacctagctcagcctggtgaggagcagccttggggagaaggggagaggtcagatgggtctgtagaaaaggaagattggaaagaggaaagactcagcaatgcttggggttgggactgagggacaggcagcagggaaagaaggaagatttaggacgagttgcattgggaacagagactagggagggaccgatgtgtaaaagaatgcctggacatcaggcacctcagaccgtttgcccattttacggcaagaattatttagatcttgtaggatggaaaaatcgaaagtgctgttttctggccatttagagccattgtcaagttggtattggggccaagtggtgttgcagaagaaaacaaggggtttaggttttaggtcaggtgtgagttgaagaggttttaagtttttgagaacacaggctcagggagaagagggaggaatggagggtggaaggtagcccatagtgaaggaggcaagcccagagaaaagagagagtagagacacagaaggggtggggggtgattaccccccaggaaagtggagaaggggtagagacatggagagaaggggttggggggttcttgccccccaaaaaagtggtacttgctgctaagggtgaaggaccaaggcaggcatccccacatggtcagacacctctgaaatgtgggtgaataatcaggcaggcgtccccacacaattaaacaccaagggaagactgtcttcccgagtctgtgactggtgccggagttttgggttcacggataaaacgcgtctcctttgtctctaccagaaaaggaaaggaactgaaattaagagaagggagagattgaagtgtgaagccaagattgaaaggagaaagaggttgagggatagtgagaggggttggagaagagagtaaaaagagaccgcttacctgatttaaaattgatgagatgttccttgggctggtcagtctgaggacctgaggtcataggtggatctttctcgcgggacaaagagcaggaggacaggggattgatctcccaagggaggtcccccgatcggagtcatggcaccaaaatatttcactcgcgtccgtgtgaagagaccaccaaacaggctttgtgtgagcaacagggctgtttacttcacctgggtgcaggcgggctgagtcggaaaagagagtcagggaacggagataggggtggggccgttttacaagatttgggtatgtaaaggaaaattacagtcaaagggggaggttgttctctggctggcaggggtgggggtcacaaggtgctcagtaggggagcttttgagccaggatgagccaagagaaggaatttcccaagataatgtcatcagttaaggcagaaacaggccattttcacttcttttgtggtggaatgtcatcagttaaggcaggaacccgccatctggatgtgtacgtgcaggtcacaggggatatgatggcttagcttgggctcagaggcctgacactaaccattgtctgagcattagggccattcatttccccctaaaaatcactgaatatcacgcaaattgccatatttcccccatgtccccttcccctatgaaaaaggctaagaagtatctgtaccccattgggttattgggtaatcagtctcctgtgagtcccctgggcaatgcatgttaaaaatacatttatatgctgccttcttctactagtctgccttttgtcacttcattttcagtgaaccttcagagggtgactgaggatgtgttccctctttgcccctacacagccaaagtggttaacatctcccccgaaatcctttacaggcatacaaaaatcatattacaaaccctccattccatccccagttcataccccagccacctcctctatctgaccctcacacatcaatctgcctgaatcactcagggccaggtactggaccactgaagaccagccgcgcattcttgagtctctgacatcattcaaagcggccaatcctgagctgtttccccttccctgccttgcctttcccatggaaaccgcaataaaggccctggcctaggctttccctctctctcccacctgctgaccgaacctggtgctttcccctgcatggcatggcatgcgcccgtctctcaggaagtgtaggtaatcaattctttcaaaggcatcaacttcatgttgtcactcagtcacttccagaagattaaatctcataaaggccgggtgcagtggcttatgtctgtaatcccagcactttgggaggccgaggtgggtggatcactcctgaggtcaggagttcgagaccagcctggccaacatggcaaagccccgtcgctactaaaaatacaaaaattatccaggcgtggtggcacgcacctgtaatcccagccgctcgggatgctcaggcaggaaaatcgcttgaacccaggagacagaggttgcagtgagctgagatcatgccactgcactcagcctggagctagactccgtgtcaaaataaataaataaatacatctcatgagaagaactgagacaactcccacctttctctcagcatctgctccctgtaggagccaagctgatccaagagattgatccaataagtaatcatattgaggataacggaaacccgggttaaaaccataaaggccaggccaggtgcagtagctcacacctgtagcactttggtaggctgaggcaagagtatcacttgagcccaggagttcgagaccagcctgggcaacatagtgagaccctgtctctacaaaaagacaaagtaaaaattagccaggtgtggtggcatatgcctgtggtcccagctactcaggaggctgaggcaggaggattgtttgagcccaggagatcaaggctgcagtgagccgaaattgcatcactgccctccatcctgggagacagagtgagaccttgtctaaaagaactttaaattatgtgatgtgaaatgtttaaaacagtttctggcacataatctttcaatgaattggagatattagtatgtaaaatctagctactggtgctgggtgtggtggctcacacctgtaatctcagcactttgggaggccaaggtgggcggatcacttgaggtcaggagttcgagaccagcctgaccaacatggagaaaccccgtctccattaaaaatacaaaattagccgggcatggtggcgcatgtctgtaatcccagctattcgggaggttgaggcaggagaatcacttgaacccaggaggcggaggttgcggtgagccgagatggcatcattgcactccagcctgggcaacaaagaacgaacctctgtctcaaaaaaaaaaaaaaatttgctgggtgtggtggcacccgcctgtagtcccagctactttggagactgaggcaggagaatcacttgaaactgggaggcagaggctgccgtgagccaagatcgcgccactgcactccagcctgggcaacagagcgagactccgtctcaaaaaaaaaaaaggagaaagaaaaagaaatcaggctactaaaatatgtagccaatgtgaccctcatatgtaagtatagtatcagagtcatcctaatttctgccacgagagggcgtgtcaggcttagttagggcttagctgccagcagctcccaaatgatggtctcagaactccttaattttattattatgattactattattagtattattttgaggcaggtccacactctgttgctcaaactggagtgcagtggtgcaattgtggctcactgcagcctcaaactcctggactcaaacgatcctcccacctcagcctcccgagcagctggactatgctgtgtaggccaccacaccggctaattttttcatccttgatagagatgggggtctcactatgttgcccaggctggtcctgaacccttggcctcaagcagtctttccactttagtgtcccaaagtgctgggattacaggtgtgagccaccgcccccagtcatgtttggattttttaagtgacatatcggccgggcacagtggctcacacctgtaatcccaccactttgggacgctgaagtgggaagattgcttgagctcaggagttggagaccaggctgggtaacagagcaagaccctgtgtctacaaacaattttaaaaattagctggacgtcgtggcgtgcacctgtagtcccagctacggaggaggctgaggtaagaggatcacttgacccaggaggttgaggctgcaatgagccatgatcacactgcgccactgcactccagcctgggcgagagagtgagactccattaaaaaaaaaaaaaaaaaaagtaccacatgtctatggcacatataatgtaacgccccaactgggttcaggatagttcctggaatcaaacacatcaacatttatgcaatgaaatgagggctattcacagaaacgtggagtaaatatagaagattgccaaaatagccttgtgttagttcaggtcaagttttgccaccaaataagttatacaacaatctctaccttttcagagttatttggaagttggaattgtgtgtggatgggggggtgtttgttttgttttgttaagacggagtctcgctctgtcgcccagcctggagtgcagtggcgtgatcttggctcactgcaacctccacctcccaggctcaagcgattctcttgcctcagcctcctgagtagctgagactacaggcacgcaccaccgtacccggctaaatgtcatattattagtagagacagggtttcaccacgttggccaggctggtctcaaactcccaacttcagttgattcacccaccttagcctcccatagtgctgggattacaagcgtgagccatcacacctggccggaattgtggctgatgaagggtgagcctctcatttctcatagataagaggtgtcctgccaggtcaaagcttgaatgcaattctgctcacagacatacagagtcagatatcccttcttttgatgaattaaaagtttgtatttaaggtgaataagacaatattcagtcaaaagtctgtttttctttagagtcaacattttgaaataagaactaaataagagcgttcctatgtctatgtagactacggcagaagccaaggctgagtgatcagcatagatcatctgagattcaaataccatgagaggggtagacgtgggccatacaattctctgaagtggagaactttcccaatatcagcttctgcccgaaagagggtgctacgttcctttgatccatgtgtaacagttgctttcccagaaaagtcagagtgagttaaaatgctacaggccaggcgcagtggctcacgcctgtaatcccggcattttgggaggccgaggcaggcggatcacttggggtcaggagttcgagaccagcctggccaacatggtgaaaccccatctctacttaaaaaaaaaaaaaaattagccgggcatggtggcgggcgcctgtaatcccggctactgaggaggctgaggcacaacaatcactggaacccaggaggcagaggttgcagtgagcccatatcgcgccactgcactccagcctgggcaacagagcaagactccatctctaatctaaataaaatcaaataaagtaaaataaaataaaataaaatgctgcagccaggcacagtagctcacacctggtaatcccagcatttggaaggctgaggcaggagggttgcttaaacctagtagctttgtttattttctttccttaagacagcagaaaaggtgatttatttatttctatttatttatttgagaactacaggtgcagactacaggagcgcagcaccacgccaggctaattttttgtatttttagtagagatggggtttcactatgttggtcagtctggtctcaaactcctgaccttgtgatctgcccccctcggcctcccaaagtgctgagatgacaggtgtgggtcaccacgcccggcctattttatttatttatttattttgagacagagtctcactctgtcaccaggctggagtaaagtggcatgatctcagctcactgcaatctccacctcccaggttcaagcaattctctggcctcagcctctcgagtagctgggactacaggcatgcaccaccatgcctggctaatttttttttcttcttcttcttcttatgcttgtttcctatcagctgatttttgtattttttgtagagacagggttttgccgtgttgcgcagtctggtctccaactcctgggctcaagcgatccacctgtttcgccctctcaaagtgctgggatgacaggtatgagccatcaggcccagtcagagcctagaattttaagtccagccttggcaacatagtgagaacccatctttacaaaaaaacaatttaaaaattagcctggtgtgatggcatgcgtctgtggccccagctactctggaggctgaggcaggaggattgcttgagccccggaatttgaggctgcagtgagccatgatcacaccactgcactccagcctgagcaacagagtggaaaaaaaaaaggtgcaatgttcttgttgtttctatctaagatggcctgccatgattgttaacagattcttcctgtacaagaggacttgaacaggatacaggaaacccctccttgccagagctatgcgtgcatcgcacaatgcctggagtccctggcttcagccactaattaccggaagctccataagtttgcaaatacctcccagcttccaagagctactcactgagccctaaaaaaggtgcctgcaggagaggtgagggtgcagggcctgggaggggccccttggccacccagagtctgtagagagtttctcctcctgggagacgctgaggccaccagcaggggactagggccacagtctccgtcacaccgctgtccagggcagtcacctgcatcagcatcaagtagacatcagcatctgcacagggaaccgtgacatatacgagacctttgcgtacatgcatgtgatgaccataaacatgagttcagcattcaaggtttgtttgtttgtctgttttttgagacggagtcttgctctttgctcttgtcacccaggctggagtgcagtggcatgatctcagctcactgcagcctccgcctcccgggttcaagtgattctcctgcctcagcctcctaagtagcagggattacaggtgtacaccaccacccctggctaatttttgtatttttagtagagacagggtttcgccatgttggccaggctggtctcaaactcctgaccttgtgatccacctgctgcggcctcccaaagtgctgggattacaggcatgagcccacacccagcccagcactcacattttattaaaggcagctgctcttctttaaagaaccccagtgtgtacaggtgtcagtatcagtcactatcggcaccaacatgcgtccacgtgccgtcatcggtaaccatgctactatcaaggcacgcctaaggctaagacacagatcttaacacgatggcatgtactgacacatgtagttgtcagaattcacatgggtggatactgacttgtgtgttgatggcagctagtgacatgacacctgcctgtgtgccattgacacatgcatgggcatatatagatgtgggcacacgcatctacactcggtgtgaaagtgtccatctgagccccatacatccaccctccaggctggagcccctcgatgggctgaggccattctgattaagttgtgtcccggtatctggcagagaacagacgcatcataaacgcttgaatgagggccaggcttggtggctcatgcctgtaatcacagcattttggaaggctgaggtgggtggatcacatgaggtcaggagttggagaccagcctcgccaacatggtgaaaccccgtgtctactaaaaatacaaaaattagccaggcgtggtgacgggcacctgtaatcccagctactcaggaggctgaggcaggagaatcccttgaagctgggaggcagaggttgcaatgagctgagatagggccattgcactccaacctgggcaacaagagcaaaacttcatctctaaaaaaataaataaatgctagaatgaggctgtgtgcagtgtctcacacctgtaatcccagcactttgggaggccaaggtgggaagattacttaagtctgggagtttgagactagcctgggcaacatactgagatatcttctctatctaataaaaaaattaaatgcttgaatgaatgaataaatggcaacaaatactttgaacagacgagggccaggcactgtgataagcactcacatgcctgatctaattaatccataccacagtctctatgggtaagaactaatgatcccactatacagatgggaaaaactgagtcataaagacaggatgtagctttcccaaagccatatgccacgtaagtgacagagcctggatttgacccaggtctctcaaactcaaaaactaatgttcttaatcactgccccatcctcgttatgatgggacaaccctctctcccaattcctggattcctgggacacaccaccaaactccttccagtgcaggcgctcagcaagctacaagaaagtaagacagcctttcatcatcaaaacagaggaggccgggcgcggtggctcacgcctgtggtcccagcactttgggaggccgaggcgggcagatcacgaggtcaggagattgagaccatcctggctaacacggtgaaaccccgtctctgctaaaaatacaaaaaattagccgggcatggtggtgggtgcctgtagtcccagctacttgggaggctgaggcaggagaatggtgtgaacccgggaggcggagcttgcagtgagccaagatcgcgccactgcactccagcctgggcgatacagtgagactccgtctgaaaaaaaaaaaaaaaaaaaaaaacagaggagaaaagagagaaactttaaacccaacgaagctcagaagttctgtgtcagggctgggtgaggtggcacatgccagttatcccaatgctttggaaaaccaaggtgggaggccaggatttgaagaccatcctggacaacacagcgagaccccatctctacaaaataaaaattaaaaaattagccaggccctgtggcatgcacctgtagtcctacctacgtgggaggctgaggtgggaaaatcacctgagcctgggcagtgaaggctgcagtgagccatgatcacaccactgcactccagcctgggcaacagagtgagatgctgtctcgaaatgataatattaaagagctacctgaaaaaataaaaaattcagttcctcagtcacactcaccacattacaggtgctcagtagccacatgaacaatttagatacagatcatttccatcatcatagaaagttctgttggacagcatggtctagcatgggtgtccaaccctttaaatggactgactcttctgcttatcttttttttatttgtctgttttttgagacagggtctcactctgtggcccaggctggagtgcaatggcatgatcttggctcactgcaacctccgcctcccaggttcaagcgactctcctggctcagcctcctgagtagctgccaccacaggcgtgcgccaccacacccagctaatttttgcatttttggtagagacggggtttctccatcttggccaggctggtctcaaactcttggtctcaagtgatacaaccacctccttttttgcttatctgtggtagtagatatcacgaaaattatacacagaccttttgagacagagtcttgctctgtcgccaggctgaagtgcagtgccgtgatctcagctcaatgcaacctccatctcctgggttcaagcaattcccctgcctcaaccctcaacctcccgagtagctgggactacaggtgcacgccaccatgcctggctaattttttgtattttagtagagacagggtttcaccatgttggccaagatggtctccatctcctgacctcaggtgatctgcccgcctcagcctcccaaaatgctgggattacaggcatgagccaccacgcccagccatggaccttttttttttaagcgatcacctatcattagggtattttatgtgagatccaagacaattcttctgcttccaatgtggcccagggaagacaaaagtttgggcacccgtgatagtctaccccagtctatatatgatcgattcttctttatggcattgtttaacatattcctctgttccctgcctttcctgtacaccagtagttacacgtggaagccgaataatttcaggttcaattattttggtgaaaatacttcctaggtctgcatccttccaccagcagacacatcaggtctcgtctttattgtgtgagactcacatcctattggccacaggaagtcacatgaccaagcctgacatcagtgagtcagggaatgtatttgacatactcaagaggacctgtaaagtcacatggtacagtcatggatgtataattctataacaaggaggaagtggagatttggaaacaataattcaagctaccatgagggcgtttttgttttgttttgttttgttttttaatcaaatgaacttttcagaaatgactcggtcagatgcggtggctcacgcctgtgatcccagcactttggtgaggccgaggcaggcggatcgcctgaggttgggagttcgagaccagcctgaccaacatggagaaaccccatctctactaaaaatacaaaattagcggggcatggtggggcatgcctgtaatcccagctactcgggaggttgaggcaggagaatcgcttgaacccaggaggcagaggttgcagtaagccgagatcacagcactgcactccagcctgggtaacaagagcgaaactctgtctccaaaaaaagaaaaagaaatgacttacgcctgtaatcctagcactctgggagctgagatgggaggatcgcttgagaccaggaggtccagaccagcctgggcaacatggcaagaccctgtctctacaaataattttaaaaattagctgggtgtggtggtctgcgcctgtggtcccagctactcaggaagctgaggcaggaggatcacttgagccctggtcaaggctgcagtgagctgtgttcatgctacagtactccagcctgggcgacagagcaagatcctctctcaaaagaaggaaataagccagatgcagtggctcacacctgtaatcccagcactttgggaggccaaggcaggcagatcacctgaggtcaggagttcgagaccagcctggctaacatggtgaaaccccgtctctactaaaaatacaaaaattagccggacatagtggcgcacacctgtaatcccggctactcgggaggctgaggcacgagaattacttgaatatgggaggcagaggttgtagtgagctgagattgccattgcactccagactgggcaacagagtgagactccatctcaaaaaaaaaaaaaaaaaagaaatgaaggaaggaggaaggaaggaagggaaggggaagggaaggaagagagacagagagagaaggagaggaagggagggagggagggagggagggacggacagacggacggacggaactaactctatgagtcacagagaggttaagtaatttgttcaaggttctgcagctggtaaatgatgggattagaatgcaggcagcctggctccagagtccactataggaaaacattggagcccacttaatggggctgctgtgacattccaatgtgaacaggaatgccaagggctcaggacagcgcttggcacaggatctgtgcatcatgcttggaactggtgctgtttatttccatcacctgattctgggttggccttggcttgggtttggagggattttctgcccctggcagtgttccaggggtggcagctggactttttaaatccaaggaccttgttaggagtcagagttgggcaaggggagactggagataaaatccgatcacaagaggtagctatgaataggtcaggagcaattctccccagccttgagcagtagggaggatgagtcaacagaagtgaactcacccttcctacttgttatagaattatacatccatgactgtaccatgtgactttacatgtcttcttgagtatgtcaaatacattccctgacccactgaggtcagggttggtcatgtgacttcctgtggccaataggatgtgagtcatacccaataaagataaccagacctgatggtaagtagaatatccatgaagatgtgcaggagaccatggccagcaacactggcttatcagaactgggttcatgcacaggtctgagtttttgttgctgaaccctctttccctgtcaataagacaagcatttattccccagtatcccaaggcctatgactccacctccaggctgccactcataggtggagctcacctggcacctgcggctggaacatctacttatcacctttccatgtggctccttgggcttcctcacatcatggcagctaggtcccaggggctatgggacctagctagatattgtgcttcatagctagatacggtgctatgaagagtgtggcagttgacatttcctggaaatggtcacagtaatattttgagtctcacatgctctcccttgtggtagcttgcccctcccatcaaaaggcagagtattttccttttcttgaagctgggcagaactttgtgattgccttgacagaggggaaaaaaagggttgggggggtgcagaagtgacactatatgcctgtgtgacttccaaggctaagtcataaaagcagacacggctttttcttgtcctttcccttcccttcccttctctctctcagcctccctctccctaccccttccccaccactggcctctgggacctagctgccatgatatgaggaagcccaagcagccacagggaaaggtcacaagtagaagttccagccacagggcccaggtgaggtcccagctgataggcagcatcaactgccagacaggtgagtgagaaagcttcagatcattccagtccacagccttttaagccaccccaaggggtgtcaagtgcagcaaagatgagccatacctgctgagccctgcccagattgcagatctgtaagcaaagcaaatcttttcactggggtggtttgtaaactagggaagttccagctctttcctagttgaagacttttcccttctttaaaacctaactcaggccgggcacagtggctcatgcctgtaatcccagcactttgcaaggccaaggcagttggatcacttgaggtcaggagtttgagaccagcctggccaacatggcaaaaccccatctctataaaaaatacaaaaaaattagctgggtgtgatggtgcacacctgtagtcccagctactcgagaggctgagacaggagaattgcttgaaccggggaggtggaagttgcagtgagccaagattgaaccacagcactccagcctgggcaacagagtgagactctgtcagaaaacaaacaaacaaacaaaaaacacctaactcagatgttgctttcctgcttaaaagcctcccatgttcccatctccttcagagtaaaagccgaagtctatacttaatctaaaagatccttcctacatgatctgccaataccacggtttcctgtcaacattgactctctgacctcttatcccactctccccatccacccctctgctccagccacactggcctccttgctgattcttaaacttacgaagcaagtcccacctcagggcctttgcacttgctgttctcccagctcagaaggctcttcccccagaactctatatagctcccacctcatgatcaggtctttgctcaaatgtcatcttctcaataagcccttccatgaccacactatttaaaattacaactccccctccctccccacaaaataaatcactcccatccttattccctgggttccatttctgcagagcacttagcataatctaatggattgcatatttcacttatgtttcttgtgtataatctgtctgcccaactagagtgtaagttccatgagggcaggtgagggatctctatctgtcttggtcactgctgtatccccagtgcctacaacagtgccaggcatatgttcaccactctgtgaatatttgttggtataaatggaaggaatgaatggattaatgggtgcatatattgttggaagaatagatccaagggaaaggaaagaggagggtaacaggaaaagagcccaactcaccctaaaaacatgaaggcttccatttgccaaaggcagaagatacttaaaaaaaaaaatcttatctccacaaccagatgatcaaccaactaatcaatcactctccaaaccatgtccctcttgcctcctaaacatttcttgtttcttccaacattttattatgagcaattgcaggcatgcagaaaagttgaaggattttacaatgaacacctttaccccaatcacctagactccactctaaacattttactgtctttgcttaattatatttctatacatttatccatccctccatccatccctccatccctccattcttccatccacccattactccatccatccatccattactccatccattcatctctccttccatccattacaccacccatccatccatccatccatcacaccatccatccacccaaccatccatccatccatttatccatccctccatccatccctccatccattcatctctccatccatccattactccatccattcatccatccatccatccatccatccatccatccatccatccatccctccagcttaattttgatgcagttcagtgaaagttgcagacaccagtacactgccccctaagtccttcagagtgtctatcggtatttgtttaccattctttattttctattttgaagtaaagtttacatacaagatgtgcaaatctgaagtgtgccattcactgagttttgacaaattcatatacccgtataacgcaaacttctgtcaagataaagaagcactcccctgatgttttttccactatacatgagccttacttgttctggaatttcatttaagtgaaattgcataatacattctttactgtgtctagcttctttcgttcatcataaggtttttgagagtcatccatgatatatgtgtatcaatacttcattttttttttgttgctgatagtattcactgcatgggcataccacaatttgcttatccattctactaatgatgaacctcaatatctcttcaatccaccccctttccttcatctccatggccccttccctggcccaggcatctcttctttacacccaggtctccactccagcccagcctccttcttgctctctgatctctaatctcactccctgtcatccaccttccagaggattttgttttgttttgtttcgttttgttttgttttttaatacagggtctctgtcacccaggctggagtaaatggcaggatcatagctcactgcagcctcaacttcctggattcaatcaatcctcttccctgagcctcctgagtagctgagactacaggtgcatgccaccatgcccagctaatttttaaattttttaaagagatgggctctcactatgttgctcaggcttgtctcaaactcctggcctcaagcaatcctcctgccttggcctcccaaacctgggattacaagtgtgaactaccacacccagctcccagaggaatccttatcaggcacatgttgtgttctgtcctgctcaaaactcggccatggctccccagtgctccctggggaatgcccgagattctttaatggctttcagacttggtttgatctcaccccgatgcacccctccaccatcacttcccatctcctctctttataatccaggctgcaaccactgtctacctgtcagttccctcaatgtgccaagctctcttttgcctccaaactgttgtattatcttccctttgcctacaatacttttcccccagccctctcattcatgtatttatttattttacagatgaggtctcactctgttgcccagactggagtgcagtggcacaatcatagctcattgcagcctccagctcctgggctcaagcaatcctcccgtctcagcctcccaagtaactgggactataggtgcacatcaccatgcctggcaaagttaaaaaaaaaaattaagagatagaggccgggccgggcgcggtggctcacgcctgtaatcccagcactttgggaggccgaggcaggtggatcatgaggtcaggagatcgagaccatcctggctaacaaggtgaaaccccgtctctactaaaaatacaaaaaattagccgggcgcggtagcgggcgcctgtagtcccagctactcgggaggctgaggcaggagaatggcgtgaacccgggaagcggagcttgcagtgagccgagatttcgccactgcagtccgcagtccagcctgggcgacagagcgagactccgtctcaaaaaaaaaaaaaaaaaaaaaaaaaaagagatagaggccgggtgcagtggctcatgcctctaatcccagctctttgggaggttgagatgggcggatcacctgaggtctggattttgagaccattttggccaacatggtgaaaccccatctctactaaaaatacaaaaattagccaggcgtgatgtcagatgcctgtaatcccagctactaaggaggccaaggcaggagaattgcttgaacctgggaggcagaggttgcagtgagccaaatcgcaccaatgaactccagcctaggcgacaagagcaacactcagtctcaaaaaataaataaatacatacataaataaaataaaaattaagagatgggatcttgctatgttgcccaggctggtctcaaactcctggcctcaaacgatcctcccccttcagcctcctgagtcattgagattacagttgagagccactgcactcggctgtccccaaccctctctctgcttgcctcactgttattccttcttaagtctgcatccaaatgccccttccacaataaacctttctgacagccccgacagggtgggtaaggtgcttccaccaagctcccacagttcctggcagttcagaccactctacaatttaatattaaaaggtcttaaattcccacttaacttcagttccaggtacaaaacttgtctcttcaaacaagaacatatcctttagcaaaagttggaaatcattttaacggacacatttcccttattgccttagctgctgggaacctctgagcgaagtttaacgctaacctacatcgtagagagacacctgttgcatctctgtgtgtaaagtgttagttctattttaatgtttgttgaaatagtgccagcttttcttgggcactgtaaatccctccgattggctctctgctgtgactccctcataccaaaatcaatgagttcttccactgaatctatcatccaactactgccccctccaaactcttccaacacacccactggaactctcgttgtcttgttaacaaccactccccttcctcagtttctcccttgaacatctcttctaccccatgtccttacctaaaccctaagaagctctaagaacaatgcttcctctgcagccccttctactatttatttatttatttatttatttagagacagagtcttactctgtcactcaggctggagtgcaatggcatgatcttggctcactgcaacctctgcctcctgggttcaagcgattctcctgcctcagcctcccgagtagctgggattacaagggtgtgccaccacacccggctaatttttgtatttttagtagagatggggtttcaccatgttggccaggctggtcttgaactcctgacctcaggtgatctgcccgcctcagcctcccaaagtgctgggattacagtcgtgagccaccatggccggcccccctttataattcagactgctccttttctaacatcccacctgcctctacactgagggttgaaagctgatttctctatcaagattcttttgggtgcaagtatctaaaatccattcaaacgaatctaagcacaaagcaaataaggcaatagtgaatgaagcaatatttgacaaaagcaacagcaaaaaaaaaaaaaaaaaaaaaaaaaagcccattgtgggtttcatttgaaaaatccaagaattaaactggagttcaggtatggctggatccaggcactcaagtgctggtgtcaaaactgcctttcacaatcgttcatttctgcacaatctcttttgcactgaacctcatctcataaagcctctcctctctttgtggcagtgtgagccccatctgctccatctgcccagcaattccagcagacatagaaaatcctctttcctaatggtttcagcaaatgtctcagggttgattctcattgggctaaattaggtaacatgccttccctgaaccaatcactgtggccagggaagcagactcaactgattagccaggtttggatcctatgtccatccctggagctggtgaaggcagagcagtggccaagccctattcaaattaaatagatgaagaggacagagaagtggtttcccaaaagaaaacagagtggggaactggcgtgagccggggagccgtgtggattcctggaggaagagtgtgctaagctgtgggaacagcaagtgcaaaggccctaaggtgagcaacttgcctggcaagttcaaggttcaacaaggccacttctgctgtagtatcctcttccctgccaaccaaatccagaatagtggtccaacacacacacacacacacacacacacacacactctgttccttatccaactgtaatgctttcacccttgcttggtacctttgtacttctcccttcatagtcgactagttaaaaaaaaatacatttctcggctcttttttgaagtaggtgtgattgagttaaaacatatttacttgacataagcttaattattcatcaatgggaacctgaaaagggagtcagagaggccaagaggttagggtggagtagagggggtagggaaggtaagctggggtgcagagggtgcagactggaggaatgggggcgaagtggggtatgggactggggtggcagggaggggctggggagagagagagaagggtaggtgccagagggccaaggattgtggaactggggtggggttgggagttggggggtggggaggagatgtggggtactctgtgaataccttagaagggatagagaaggcagggctaggggtttggaaggggtgggattggaggtcagaggggctcaactggggttaggaaatggaaaggtgagaagaggtgggggttagaggctggggactggggtccagagagcagagtgaactgagtgggttcagaagagtactggcgttggcacttcagaggctggactagagaaggcgcgttcagccgacggtgcgggatacactgccgaggaagtccgcggcgaggggcgtggttggggggtgtgtattacacggtatcccccccttgcctttccaagtctttccctctggttccgcctccttttcaggagtgacataccgttgcccaatcagagcctcaggcctggcgtggcacagccaaccgcgcggcgtggggaggagctggggagggggctcgcaaggccggggagggggctaggggcctccgagggctccggagcggcgactggcgagccatggcgctggggctgcagcgcgcaaggtactgaagttcgggggcaggagttctgggaattggggggctctcctcctggagacccctgagctggattgttggggggggtggggttcgcgggtgcgagccaagaacgccccggggcgcgcagttggaggcacatccccaccgcactctccacccttagggactgcaggggtgggggattccctacgtctctggctgccccgcccctctggccaagagcggcttcggggttcccgatttctcgctacccaaggctcatttaccctcctggttgggggtggaacttgggattcctgataaattaggggtgattgcatttgagcagtccccaggcttctgcgggagatattcgccctccacatattgatccctctggcctctgaaccccccaaaattgagggtattctttgccaccaggtgcctgggatcctaggtgatatgggatacccctaaatggagccttcccacatatagggagtcccttggaatggcattcagctcctgagttcaagagaggagagatctcctctaatagtatgcttcctgacacagtctcctaaacattgggtttccctagaaatgggcagaggggagcccctttcagaagccgtctgggacccttcccaagagactttttgtatcctttcaaaagccagagtcacccccttaaataacagggaaacaagctggacccacttcccaaagtccagcccctcatctcacccctgcacccccatcctgagagacaggggagcctcatccaagctttattttggggagactccatggcagggtgctgtgagcctgcaggctgtgatgggaacgccccctgccgcagtactcagatggggtcatcccgggcagagggtgggtttctgggttcacttgcccagcaggtgcagctctgctggaacacaggggaacctgtgccctggggccgctgccggggggttttatctggccatgttcccatgggaccctggaaaatgttctaggtcctcagctttccctgtccaatgtgaggcacccagtaagcctcacccccttccctcctccctggcttctcaggcctgattggatccatgcacaccccatgtttctaaccgcccccatcctctcccctgtcccctactctattccaggccctggctctgggcctaacaaggaactctatcccaccccttttgggccagctgtcgttccgcccctctcagcgccccctcctggctgggtgggggcccctcttggctgagctcgggtgccccccctccccacccaaggccggccctttcctgtggagtcatctcaccgccgtgcgcacccactcgtaactcgcacccgggtcctggctgcaccgcatcccctcctgcaccccctggatggcccttcagccaacgggggcctgggcgatggtgagtgggcccccaacacctcctttcccccttcccttcctctagctggggctggctgccatcccactgtggccaaggatgctcttgggaagtccctggtgggtacggcttgcagcccagagtgcccagtgaggtagtattcccggagaagataggattttggggaccagcaccctaccagattaccatgtccttgagaacaggcagagtcggggggcagagagactcccccagacccccatgccaagtccctttgcaaacccaaaccctgcctctggtctctcaggacacctctctgcaatgccaaaaggcatccttgcccagctacaacctaaacccccacccaccaaatcctctgtgcttttcgtaagacgcccccccccaatacccagctgggtgtcagaatagaaaagcccagaagtagccctgaatgtgggcagggactgcctgcttttattatgccttcctcatgggtggcaaattcttcagggcagggaagaggtgaacttctctccttcctggttggaggggggcactgggccccaacccccattctcaggcctcaccctgagcccgccaggccctggccccaccccctgttcttggctggaacacggaggaagggtggcagggttccagctgcacgtcccaagctgggcagagtgccagggggctggaccagggctgggcatggggccagctggggcgatctggaggcagcaggggtgtgacgggggaagggaccgaggctgctaggcaaaagaggggtggggcaggggcctcttgggtgggggccacacctgccaagagcacagggcccaaagacagggttcaaatcccatctcacccacttcctggtggtgtggaattgtgtcagtgactgccgctctgagcctcactttcagatcctggaaatacgggcaggccgggtgcggtggctcaggcctgttattccagcactttgggaggctgaggtgggcggattgcttgagttcaagaccagcctgggcaacatggcaaaatctcatctatactagaagtaagcaaattagccaggcatggtggtgagtgtctgtagtcccagctactcaggaggctgaggtgggaggatggcttgagcctgaggcagaggttgtaatgagccaagatcaggccactgcactccagcctggacaacacagccggaccttgtcgcaaaaaaaaaaaaaatagaaaaatagaaaaaaaaaagaaaactgggtatcacactccctttccaccaccccagatcaagatgaggagccagtagtgaggaagcagacggtggggggcgggacacccaacaggtgtgccacaaactgagctcaagtcagagtagacagacctggcttgaatcctgtctctgctactaaaagctgtgtggcttcagtttcatcacctctttgggcctgcttcctcatccggaaaatggggaaagtcattgcaggaacatggtcggattcactgagaagtggttgaacatagttcagtgtcaatggagggcgctgggttacttgggctggggatgccattgctccaaatctcagtttctgcctctttaaaaggagagatcacttctcctgctcaatagggtagtagtaaggacttaatgggttctctagctccgtgagtgttcaacacaccaatgctatcattattacagtatcactgttatttaatcctccttttaagatgcttgtgtaaaaaccatgtatgtaattgcatgcacacaccacactatggggcgtgtagagtaatccacaggttactgtaaagcccaagaagctcctaagcccatgctttccatctctgatacgcacagagggagaacagtaagtctaaccttggccgggcgcggtggctcatgcctgtaatcccaacattttgggagtccgaggcagacagatcacctgaggtcaggagttcgagaccagcctggccaacatagtgaaaccctgtctctactaaaaatacaaaaattacccaggcatggtggcaggagcctgtaatcccagctactcaggaagctgaggcaggagaatcgcttgaaactgggaggcagaggtgacagtgagccaagatcaagccactgcactccagcctgggcaacagagcaagattacgttcacacagcttataagcagtcacacagcttgtaagtagtggagcttgtaagtagtagcttataagtagtggagttgataagtagtagagtcaggattggaaccctgagccagaggaactagcccccagtctgtgtaatgggaaagacccacacttcccagtagaacatccagagggcaggctgggagctggaaggagggtccctccgcagccaccagctggctccttctatggaagaagcagcccagccacagaggattacagagcccagctgcctgggaggtggggcactggccccacctccctgccagttcccactccctgttccctgtcgggcccccagctccgtgaggccctctcgcccccaccctctgggcaggaagacaaacagggctggaacagaacaggacggaatgtcctctcaggcaggcaggactgaggcccctgcccccaccagccaggaaggaggggacggggacaggggccgtatctcccctgctccaaccctccatccaaactgcccccttctgtgcctccctccctgctgtactgaggattttattttccttctgtctccagacaggaaaatatccccttgccctggggggtggggccgcaggtctcttgcctgaggctggggttgatgccaccccagaagcaccctctgctcttgaatttaagaagggacagtgtcccctcctagaggttctgcttccctcggatgggtcccaaggaggggatgagaaaaagcctgaagactggaaactcaccgcccagattcaaatcccagctcagccagttgttggctttggggcttcttgggcaaggacttcacctttcagaagctgtttccccactgtaaagtggaagtttaaaatgcccccctccgccgggcatggtggctcacgcctgtaatcccagcactttgggaggctgaggtgggcagatcacttgaggtcaagagttcgagagcagcctggccaacatagcgaaaccccgtctctactaaaaatacaaaaattagccgggcgtggtggcagatgtctgtaatcccagctactcgggaggctgaggcaggagaattgaacccggcaggcggaggctgcagtgagccaagatcgtgccattatactccagcctggctgacacagtgaaactccgtctcaaaaaaaaaaaaaaattaaaaattaaaaattaaaaaataaataaaaaatgaaatggctccctcctaggggtcccctgaggattggatgaatacatgtagaatatatagtacagtggcaagcacataaatgcttagcaaatgacagctgcctattactaatagtaatatttatcaatataaatgtagatgagactatatataccatatactacactagattatatatacaatatagtagatgtaacacatcatataataattttttattttgcctatttttgttaatttgttttttgtcttttttttgttttttatttgtttgttttgagacggagtctcactctgtcgcccaggctggagtatagtggcgcgatcttggctcactgcaacctccacctcccaggttcaagcgattctcctgcctcagcctttcaagtagctaggactacaaggtgcccaccaccacgcccagctaattttttgtatttttagtagagacagggtttcaccatgttagccaggatggcctcgatctcctgacctcgtgatccgcccgcctcggcctcccaaagtgctgggattacaggcgtgagccactgcgcccggcctgttttttgtctttttttagagacggagccttgctgtgtcacccaggctggagtgcaggggcacaatcatggctcactgtaacctcaaacctgggttcaagtgatcctctgtctcaccctcccaaattatagccgcttccggctataattttgtatgaaagaggccaggcgtggtggcttacacctgtaatcccagaatttggggaggccaaggtgggaggatcacttgagttcaggagttcaagaccagcctgggcaacaaaatgacacactgtctctacaaaaaatacaaaaattagctgggcgtgctgatacgcacctgtggtcccagctacataagaggctgaggctggaggatggctttagcctaggatactgagtctgcagtgagccatattcatgccattgcactccagcctgggcaacagagcgacagcctgtctcaaaagaaaagaaagaaaagaaaagagaaactttgggttcagaaagacctggagtttgaatttgaagacagtggcagaaacagggagaagagctaaaattctggacataaatccaggcccatagagatagagaaaatttgagaatttaggtagaccattgtttaaaggcaggcttccctatttgtgggcaggcactgcacctctctgagcctcggtgtcctcatctgttcaatgggacgttatcaacttccttctgggtggcctgagcattaggcgggttaatataagtttcgcacttggcactgggagtgacaaaatagtaaaagctggataagtggcagatatttctgataaaacgacacttattcttccaaccccacatgcaaaatgtaggtatctgaagtggattacagggcagggtgagtggtaaacagaacaggttgctttgctgtgtcaccctggcgggtccctgcccctcttagggcccctgttggtggttcatcgttagactttgagatctatgttccaagattcacaggacggctcagttgagggaaaagggcagaggaggtgattctgggaaactgcagggcagggggcctgggaggctgtaggcctctccttcgtgggccctccctcctctggcccctggccagctcagccagccccctcccagcaggggccctccctgtcccccaggcgtccctagcctgggaaataaactgcagataagtcagggaggggacagagcggccctaggcgcgccacagagaggagcgaggcgccagaggcaccatggactggcaagaccacaggtaaaatcagggctaggaagggctccacagtgtagcccttccaggcccagggagcgccgcgaactcgacagggccacacatcgaggcctgcgcagccgcggcccagcactccacgagccccggccccacgtggcagctccccacgtgctcgtcccgtcctccttttctctttcccgagtcaccaccagtgaatgctgcccatgccctcaggtcgaccacggagctgcgcaaggaaaagtcccgggatgcggcccgcagccggcgcagccaggagaccgaggtgctgtaccagctggctcacacgctgcccttcgcccgcggcgtcagcgcccacctggacaaggcctctatcatgcgcctcaccatcagctacctgcgcatgcaccgcctctgcgccgcaggtgagccccgcccgcgggaattcccgtcttggtcaggccccgcccacggaaaaaaactacatcccagggaggcccctcctccgggaagccttattctgacaaagccccgccccctggtgtcgtttttttcggcggagccccacccccctggaatcgacttccccggggaggccccgccccctttgagttcctggcctgctgggagtcccgcccccctcgaagtctatcacttgtgaggccccgcccctggaacgcgccctttggaagccccgcctccttaggactcagaaaatccgctaacccttcaactcttacgatttggtcctctaggagactctcccagatggataggccctggtctctcataatatatccactgggaggctgcgccgcccaacttttcgttactgtatctgagagtcccttgtcccttccccacccctctagttctacatcacttgttctcttagtaggcatctccttgaatttctacccagttagaattgcatcctgcagcgggctttgccacgcacgtgcacgcgcgcgtgcacacacacacatacactcacacataaaccccgtggaatcccaggaccctgaaagcgggggaagtagcgttattctctgggaggctctgtccatttgacttccctgccccatagaattttacttttcttggaggctttacccccttagaagtctgttccctgggagtcccttcttctctagagttctgtccctctggaaggtcctgccctccatgagtttgaaccccttcgaggcttccccctcatctctatattacaattccccttaggccctggccccttcatattttgaccctggggagttccatccacttagaattctgtcctcctaggaggcccacccacatccttagaattctgttcccttgggagactcctacttccttagaattctgccaccctgggaggccctgcttctaattccagtgcttcttggtcctgctttcttccttgggaatccaggccactaggatgtacccccacttccttgggggtgcatgtaagtttctctgaatgaggaaaggcagagggaggctagcccagggtcagtccataattcagaccataactgactagagatgcccccatccccctgccccgggcaccaggggagtggaaccaggtgggagcagggggagaaccactggatgcctgctacctgaaggccctggagggcttcgtcatggtgctcaccgccgagggagacatggcttacctgtcggagaatgtcagcaaacacctgggcctcagtcaggtgagaggagctccttgctctgtgcctggccctgtactggtgatgctggggatacagtggtgaccaggacagccatagccctacctttatgggactcacaatacaaaggggatataggtatgtcactagacaggaagacccagaatggtcagggctgggatgggacagtctagggggctgtgagagcacaggggtggggtgtacctgacccagcctgagtgggaatggagggcttcctggaggagaagatatctgagctgaaatctgaagaacttagccggtcaaagggtatggagaatggatgggatcagtgaagatcaggaatgtacatggtagagggaacagaggaggcaaaggccaagaggtgaggaaaaaaaaacagaataatttggggaaataaagttggccacgtgcagtggctcacacctgtaatcccagcactttgagaggccaagatgggaggatagcttgagttcaggagttcagtgtttcacctgggcaacacggcaaaaccctgtctccaccaaaaatacaaaaaatttgccagatgttgtggcacatgcctgtggtcccagctacttgggaggctgaggtgggaagatcatgtgagcctgggaggtggaagttgcagtgagccaagattgcaccagtacactccagcctgggtgacagagcaagacccagtcgcaaacaaacaaacaaaaaaataataaaaagtttatcctcctaggtgcagagtgcaataggagaagctgagagacaaaaggctagagaggtcatcagggtagactgtggccaaatttaaggccaaattatctttatctccagggccccggggagctatagaaggattttaagcagtggagaggttgtgccagaaaggtagaatcagatttacatttttgaaagatcctctaggtacggcatggaggtagatttggagggagtgagatcagaggttgaaagatcagcaatgggtagatgccaatctcaggtgggagaagaggaataggggcagggaccatggggatggaaagataggaacaagagacatttagaaagtagaacttacttttttaattaacatggaaggcttcatgcatttgcatatcatccttgtgcagaggccatgctaatcttctctgtattattccaatttttagcatacatgctgcctaagcaagcatagaaagtagaactaactttaattcatccttacagcaaggcctacaagaaagttcccattcttttttctatctcacataaataggctccatagttggtatctgttccttttctctgcctcgttaccccactcctggtaccaatttctctgttagtgtgagtgagctttttggacccagagagatgaatgtcccgaggttccaaagctaggaagtggcacagccaggatttgactccagctacaagagatgttgtcagaggagcgagatctccctctttccctattcaccagcaccagcaccattcacatggtgagccaatagggtccaccttcatctgtgtcccctcctcccagcaccacgctcatttcctaaattgaaatgaagaattgggttttctgcctgccagaaaagtgtgatttgaatggagtctcatctcggggccttgcgcttactattcccctctttctagaatactcttactccagggggccataaggccacctcacttgctttgttcagcagctttttaaatgtcacctcttcaaagaaactgtctagaccactctgtctaaagcagcctcccatcattgcgttaccttgtactgcttttgttttcttcatgttacttgttatattgttgttatttgttctttcattcactgtctgtctcaccccactggccagtaagctcttcaaggcagggatttgtgtgtgcagtcaccgtgtccataccatttagaagagccaggtgcagtagctcccacctgtaattccagtactttgggaggccaaggtgggaggatcacttgagctcaggagtttgagaccagcctgggcaacatggtgagacccccatttctacaaaaaaatttgtaaaaattagccaaaagctggatgcggtggctcacacctataatcccagcactttggaaggccaaagtaggcagatcacttgaggtcaggagttcgagaccaacctggccaacatggtgaaaccccgtctctactaaaaatacaaaaattagccgggtgtggtggcacatgtctgtagtcccagctactcgggaggctgaggtgggagaatcacttgaaccagggaggtggaggttgcagtgagctgagatcgcaccactacactccagcctgggcaacagagcgagactccatctcaaaaaaaaaaaagaaaagaaaaaaatagccaggtgtagtggcatgtgactgtagtcccagctactgaggaggctgaggtgggaggatcagatcgcttgagcccaggaggttgaggctgcaggaagtcatgatcgcgccactgccccgctgcattccagcctgggcaacagagcaagacctgtctcaaaaaatagatagatagacagataggtagacagacagacagacagacagacagacagacagacagacagatagatagatagatagatgagggcctggcacttggtatgcgctgaataaatgcttgctcagtgggtggatggatggatggatggacaaatggatggataaatgaatggggagactggtgaaatcatccaggctcatgaattggagcaggggaatgaggatgggatggaggagatgggtcagaagccctggtagacccccacccctctcatccctggcagctggagctcattggacacagcatctttgatttcatccacccctgtgaccaagaggagcttcaggacgccctgaccccccagcagagtgagttccctggaggcctctgtccccaccatacagaggaggaagctgaggctccacccctccctcagcatatccccacctcctgtggaacaccagactaagacaagtaggaagaggagagatggccctgccctggggtctatggggacaaagaccctgccctgggggggtctgaggggacacagccctgccctggggggtccaaggggacacatactacccctgggggaccctctctggttccaggtcccaattgttgggatggagctggggaggcctgagcagccagggtgccggagggcactgggcctgtgtgtagctgcctgtgacctccccgctgcccccgggcctccccagccctgtccaggaggaaggtggaggcccccacggagcggtgcttctccttgcgcatgaagagtacactcaccagccgcgggcgcaccctcaacctcaaggcggccacctggaaggtgcgtggggccgggccagaggagggcggggacgctggggctgggtgtgagccctgaaagatcttgaagggtgctggagtccaggcatctcctaggctggggaccctgcggggctcactcaggtcaggtctagcgggtctcagggcatcgaggagcatgggtgtctgtggagttgggacctggggctcctgtaagctctcttaggatgggttcctatgggcctggggctggggatcctcagtccctttgaacctgaagtcttcatggggttggaatctcagctccctgatgggccctcaggacgcatcttccaaccccatgggtggtctcaggcccagaggcaccactgccttgtcccctcatctcggcccccaggtgctgaactgctctggacatatgagggcctacaagccacctgcgcagacttctccagctgggagccctgactcagagcccccgctgcagtgcctggtgctcatctgcgaagccatcccccacccaggcagcctggagcccccactgggccgaggggccttcctcagccgccacagcctggacatgaagttcacctactgtgacgacaggtgggcaggggccccctcttccgtctgcccaagttcaagtgctgtttccctccccacctccacactcccgcatttctctctctccttctctctctctctctcacttcatccatctctctctctctttgtgtgcctgcctgtctctgaattttctacatgccttttatatcttttctttttttgtaaaatcgctgccttgccatttgcccagactgctctcaaactcctgggctcaagccatcctcccacttcggcctcccaaagtgttgggattacaggtgtgagccaccgcacctggcctccttttatctttcattctctttctgtctctgagtctttctcttagtgtttgtctctctttgtcccttttcttaaatgagtcaatttgtgtcaagcagttaatatggtgcccagcacacaggaagcattcaataaattgtcgataggccaggcacagtggctcacaccggcagtaccagcacttagggaggccgatgcgggagaattgcttgagaccaggagttcaagaccagcttggacaacatagggagaccccgtctctacaaaaaaattagccaagtggggccgggtgcagtggctcatacctgtaatcccagcactttgggaggccaaggtgggtggatcacctgacgtcaggagttcaagaccagcctggccaacatggtgaaaccccaactctactaaaaatacaaaaattagctgggcatggtggcgcatgcctaaaatcccagctactcgagaggctgagactggagaattgcttgagcccgggaggcggaggttgcagtgagccgagattgcaccattgcactccagcctaggcaacagaacaagactccgtctcgaaaaagaaaaaaaagaaaaaatttgtcaggcgggtggcatattcctttagtcccagctacgcaggaggctgaagtgggaggaataattgagcccaggaggttgaggctgcagttagccatgattgcaccattgcactccagcctgggcaacagaatgagacactgtctctcaaaaaataataataataaataaaataaactgttattatttgttcaccctctatccttcctttcatctctttttctctccccctctcttccttctgtccttctcttccttcttctgtcttatccctcgccctggtgtcatgcttaggaatggtgactctggattcagcctgcttgagtgtcagtcttggctgtgtatccttagccaaatgacttcacctctctgtgccacaatttcctcacctatactgtggaatcataacagaacctgccttgtacagtcgttctgagcagctcagtgagtttcccggtgcaaagcacaagtatctaatttttaaatcattattgtcatcattactttttgttgttgttgttgaggtggagtcttgctctgtcacccaggctggagtgcagtggcaggatcttggcccactgcaacgtccacctcccgggttcaagtgattcacctgcctcagcctcccgagtagctgggatcacaggggcctgccaccatgcctggctactttttgtatttttagtagagatggggttttaccatgttggtcagtctagtcttgaactcctgacctcaggtgatcggcccgcctcggcctcccaaagtgctgggattacaggcgtgagccaccgcacccggcctatcatcctcattactttttatttattttcattcttctctttctttttgtgtttttttcttcccctctcttcctctctcctatgtcatgcatgctgtctctttttctgtcttttcttagctcttcttcccctctccaccccttctcttcccttgtattagttccctgttgctgctgtaatatattaccacgaactcagtggctccaaacaacacaaactcactgtcttaccgttctggaggtcagaaatttgaaatgaggccaggcattgtggctcacgcctataaacctagcactttgggaggccaaggcaggaggatggcttgaggccaggagttccggatcagcctggacagcatagtgagacctcatcttaaagaaagaaaaagaaattagaaatgagttttacaggccaaattaaggctgtgttccttctggaggctccaggaaagaatctgtttccctgccttttccagctgctagagctgggcccacctgcatccatctccctatctcaagactaacgttaggcaggccgggcgaggtggctaacacctgtaatctcagcacttcgggaggctaaagcaggaagattgagcctgggagttcaagaccagactgggcaacatagtgagacccccatctctacaaaaaaaatgcaaaaagtagccaggcagggcacacacctgtagtcccagctactcaggaggctgagtcaggaggattgcttgagcctgggaggtcaagtctgtggtgagccatgattgaaccactgcactctagtctgcgtgacagagcgagagcctgcctcaaaaaacaaacaacaaaacaaacaaaaaacttctaatgtcatcatatctgcaaagtccctttagccacgtaagagaccatatctacagattccgggaattaggatgtggacatctttgggggtcattattcaacccaccacactcctcttgttctgtttcttactccttttctctcggttacaatccttctcgacatcttgctggctttgttcctgtgtcctctgctgctacttccctctgcctaccctctctctcacccagtagcatcctgaccagaccccactccgccccacccccaggattgcagaagtggctggctatagtcccgatgacctgatcggctgttccgcctacgagtacatccacgcgctggactccgatgcggtcagcaagagcatccacacctgtatgtatcccatttccccaggtgcgaagccagctgccacatggcccccagctgacaccaggaccccccagctccccataccccaggatgcactgcctccccacctcaacaccagctccctgctccccaagccccaaggaactgtctccttccttgccccctcatacccagtccccagatatttctctccccatttgcccccttggtggccctgatccctcccgatccccctcctcagtgctgagcaagggccaggcagtaacagggcagtatcgcttcctggcccggagtggtggctacctgtggacccagacccaggccacagtggtgtcagggggacggggcccccagtcggagagtatcgtctgtgtccattttttaatcaggtaagcaggaggaggggctggggtggctgtgtgtgggcctgatctgcatgtgtggacaggtgtgtgtgtgtgtgtgtgtgtgtgcgtatgagcatgcatgtgtatcatgcataagtgtatgtgagggagtgtgcacgtgtacacatatgaggaatgtgtgtcaccatgtaaatgccggtgtgtgtgtctgcatggacacaggtatgtgtatgggtgtgtagactgttaatttttttttttttttttttttttttttttgcgtgaacctctgcttaagtggattgttaattcaaattagaaaggggtctttatttggcctggcatggtggctcatgcctgtaatcctagcactttgggaggctgaggtgggcggattgcctgagctcaggagttcgaaaccagcctgggcaacatgacgaaatgctgtttctactaataataccaaaaattagccgggtgtggtgacacatgcctgtaatcccaactactcgggaggctgaggcacgagaatcattagaacccaggtggtggaggctgcagtgagccgagattgcgtcagtgcactctggcctcggcaacagagcgagactctgtctcaaacaaacaaacaaacaaacaaacaaaaggactctatattcaagttaaaataagaagtgtaacagaatcatggggtcttttttgctttttaaattttgatgtggctcacacctgtaaatcccagaactttgggaggccaggggaggaggattgctagagcctgggggttcaagaccagcctgggcaaagtggttaggacccattctcaaaaaaaaaaaaaaaaaaaaacctgaaaacagaccaaaaaaaaaaaccacacacacgcaaagatagatggtttgcatatggtaaattctctttatggtacacagttctgtgaatttttgacacacgcatgcagttgtgtaaccactatcacaatccagctattgaccaattagtgtgattataatagtggttacacaattaccacgattttttttttttttttttgagacagagttttgccctcgtcactcaggctggattgcactggcacgatctcggctcacttcaacctctgcctcccaggttcaagcgattctcctgcttcagcctcccgactagctgggattacacgcaacaacacgcccagctaatttttatatttttaatagagaaggagtttcaccaggttggccggtctggtctcgaactcctgacctcaggtgatccacccccctcagcctcccaaagtgttgggattacaggcatgagccactgcacccggcccatgttgtggtttatatcagtagttcctttgtaaatagtgaacagtattccatggtatgaatagagcacaggttttttttttatccattcaccagttagaagacattgggctgtttccaagtttgggtgattacaaaaaaacagctactgtaaacattctcatacaagattttatgagatcacatgttttcatttctcttgggtaaacagctaggattggaatggatgggttatatagtaagtgtatatttaatctaagaaactgccatggctgggcacagtggctcacgcctgtaatcccagcactttgggaagccaaggaaggaggatgactagagcctctgaggtgaagaccagcctgggcaaagtggttaagactcaaccgcaaaaaaagaaaaacagaaaacctgaaaacaaaccaaaaaaaaaaaacaaacacaaaaatatatatggttttcatgcagtaaattctgtttatggtacacagttctgtgaattttgacacatgcatgcaattgtgtaaccactatcacaatccagctattgaccaattagtgtggttacacaattaccacaatttatttatttttatttttatttatttattttttttgagacagagttttgcccttgtcactcaggctggagtgcactggcacgatctcggctcacttcaacttccgcctcccgggttcaagcaattcttctgcttcagcctcctgagtagctgggattacagctgggattacaccaagcccagctaatttttgtatttttagtagagtcggggtttcaccatgttggccaggctggtctcgaactcctgacctcaggtgatccacccgcctcagcctcccaaagtgctgggattataggcatgagccaccacacccggccattaccacgattttttacacaaaaatattctcttgtagtaaacccctcccacactcccatgtccctggcaaccactgtcctcagaccccagagttttgctttttccagagggtcacatacagggaatcctacagtatgtagccttttgggcctggctcttacttagcttgatatatttaaaattcctccatgttgtggtttttctttcttggtttttttgttttgtttttgagacagagtctcattctgttgcccaggagtgcactggtgcaatctcggctcactacagcctccgcctctgaggttcaagtgattctcctgcctcagcctcctgagtggctgggattataggcgcgcaccaacacgcccagctaatttttatatttttaatagagaaggagtttcaccagattggccaggctggtctcgaactcctgacctcaggtgatcctcctgcctcagcctcccaaagtgctggaattacaggcgtgagccaccgcgcccagcccatgttgtggtttatatcagtagttcctttgtaaatagtgaacagtattccatggtatgaatagagcacagtttttttatccattcaccagttggaagacgctgggctgtttccaagtttgggtgattagaaaaaaacagctactgtaaacattctcatacaagattttatgagatcacatgttttcatttctcttgggtaaacagctaggattggaatggataggttatatagtaactgtatatttaatctaagaaactgccatggctgggcacagtggctgatgcctgtaatcccagcactttgggaggccgaggagggcagatcagttgaggccaggagtttgagaccagcctggccaacatggcgaaacaccgtctccactgaaaatacaaaaattagccaggtgtggtagcacatgcttgtgaccccagctgcttgggaggccgagacatgagaatcacttgaacccaggaggtggaggttgcagtgagctgagatcacaccgctgcactctagcctgggtgacagagtgagattctgtctcaaaaaattaaaaaaaagaaagaaagaaacagccaggacagggtgcggtggctcatgcctgtaatcccagcactttgggagtccaaggtgggtggatcacctgaggtcaggagttctggaccagcctggtcaacatggtgaaactccatctctactaaaaatacaaaaattagcttggtgtggtggtgcatgcctgtagtgccagctactcaggaggctgaggcaggagaatcacttgaacctgggaggcagaggttgcagtgagctgagatcaggccactgcactccagcctgggcgacagaaggagacaccatttccaaaaaaagaaaaacagaaacagccaaactcttttccaaagtggctgtatcattttgcattcccatcagtaacgtatgggggttccagttgctccacatctgtgccagcatttcgcattgtctgggtgtttgggtttggtgttacttttagtcattctaatagatgtgcagtgggaaaatcacgatggggctttttttttccatcatgtgtcatagaagcttttcaccatttagaaatgcagaggtatccatgacaacattatgaggcagagttagaattacagcttttcggtcgtgcgcagtggctcatgcctataatcccagcactttgggaggctgaggtgggcagatgacttgaggtcaggagttcaagaccaggctgaccaacatggtgaaaccccgtctttactaaaaatacaaaaattagccagatgtggtggcgtgtgcctataatctgagctacttgggaggctgaggcaggagaatcacttgaaccccggaggcagaggttgcaatgagtggagatcagaccactgcactccagcctgggcgacagagtgagactccatctcaaaaaaaaaaaaaaagaaaaaagaattataccttttctttgaagaaggttatcttataggacatgcaccagttttctaaagccttaggggtttttctagatctggaggaatgttctgaaatacaaatcaacatatacatatgtatataaattttttttgaaataaagtcttgctttgtcatgcaggctggagagccgtggcacaaacagggctcgctgcagccctgacccacctgagcctcccaagtagctgggactataggtgcgcactaccatgcctaatttttttttgtattttttgtagagatggagtttcatcatgttgcccaggctggtcttaaactcctgagttcaagcgacccacccgcctcggcttcccaaaatgctgggattacaggtgtgagccctggtacccagcctataattttttaaaaatagggatggggtctcactgtgttgcccaggctggtctcaaactcttgggctcaagtgaccctcccgcctcagcctcccaaagtgctgggattgcagatgtgaaccaccatgccaggcctacaaatcaacttatgcctcatgtctctacccttctcagagcccttctgaagctccccagtatcctcaggagaaaagccaagggcgttggtgtggttcaccaggccctgtgaagctcctgcctccctccccttctcacttaccctccaaatctcagggcctttgcacaggcagttcctccttcccagaatgctctcttctcttccctcctctcctttctcctgagtcatgcccgctcatccttccagtctcagctcagacatcacttctggagaccctctttcctgagcccctacatgagctcaggtgtcccccatgcccattttctctcctggtgtcctgtacttttgcaccagagcacttaaaaccatttgtaattatcctattaacttgtgtgttcagccaggccttcttcgatcgtccttttcaaaattgcaaactcccatcactgctttattttctctgtagtacttaccactatcttttttttttcttctttttttgagacagagtctcattctgttgcccagactggagtgcggtggcacaacctcagctcactgcaatcttagcctcccgggttcaagtgattctcctgtctcaaccttccaagtagggattacaagcacccgccaccacacctggctaatttttgtatttttagtagagatggggtttcactatgttggccgggctggtcttgaactcctgagctcaagtgatccacccacctcagcctcccaaagtgctgggattacaggcgtgagccactgtgcctggccctccctagtattaccactatctaacccaacgttgtccaataaaagcatgatgccagccacatatgtcatttggaattttttttttttttctttgagacagagccttgctctgccacccaggctggaaccacattaaaaaggtaaacggaatgctgggcatggtaactcacacctgtaatcccaacgctttgggaggccaaggccaggagtttgagaatagtcttggcaacatagggagaccccatctttacaaataatttaaaaattaacccagcgtggtggcatatggctgtaatcccagctactcaggaggctgaagcaggaggatcactgagcctgggagattgaggctgcagtgagccgagatcgcaccactgcactccagcctgagcgagagagtgagatcctgtctcaaaaaaaaaaaaaaaaaaaaaagtaaacagaagcaggtgaaattaattttattttttaaatttcattttatttatttatttatttattttgagacagagcctcactctgtcacccaggctggagtgcagtggcgtgatctcggctcactgcagcttccacctctggggttcaagtgattctcctgcctcaacctcctgagtagctgggactacaggcgcatgccaccacactcagctaatttttgtatttttaatagagatggggtttcaccatgtgggccaggctgatcttgaactcctgacctcaggtgatccacctgctttggcctcccaaagtgctgagattacaggtgtgagccaccgcgcctggcctaattttaacaatacattttattttcatattcaagatcacaccactgtgtaagtagcggagctgggatttgaacccaggccactgactacagagtccttgctgtgaaccactacacagcagtgcttgatgaggatatatttgtggaatgatgaatgagttaactgaatgtgtcacacgtgcacatattcgagcccaagtgtatggagcatgtgagcatatgtgtccctatatgcactcaggtgtatgtgagcgctcctgtttgtgcctgtgtgtaccgagtgtgtatacaagttcgattgtgtgtgcttgtatctttcaggggaataagggtggctttgatccagcctaaattgggatgtttccagcccagggagggtttattgagtgtggggagaggtcatagcttctcaaggagctggtgggaagaccaggcccacctgcctcctgtcctgaagggggttatgcagatgagatacaaatgagggcctgatcctcagccccacccaactctccaaaagccaacttgcacagcgagcatttagattgtctctgcagccagagactgtgtgaagggaggtgccagggacataaggatgtatttctaaacctgttcccttgagtatgaaaaacatctatgaatagaaacagcataaataaaatcttattcataaaaattacagccctatgaattcttcctatttggtcatgtaatgaagactatgttaaaaatatattttttcatcaatacctttctaagaatatgtttataagtaaaaatctataaagagaatatttagttattctgaagcctttcgctcaccccgctctttgcccctgggcctcctctctctgttcctaggtctcctcccgcttctgtctttcagtgccgccccacccccttccctcagtcttcctcctctctgcccaggctgtgctaaatgccagctcttttttctgcctttccttttacagaaggagcttgggaagggacaaacttaactttcttttaaaaatggtgtcagaataggccgggcacagtggctcacgcctgtaatcatagcactttgggaggctgaggcaggtggatcacctgaggtcaggagttcgagaccagcctggccaacgtggtgaaaccccgtctctactaaaaatacaaaaattagctgggtatgggggcttgcacctgtaatcccagctactcggaaggctgaggcaggagaatcgcttgaacctgggaggcggaggttgcagtgagccgagatcgcgccactgcactccagcctgggcgacagagtgagaccttgtcttaaaaaaataaaatgctgtcagaataaaaagcagtcaacagaaatgaaacccttataggagacaaataaatgtgggcaattattttctgcaaaatgccctccaagcccctgggcgccattgccttctgtaataggacatcacctgaacaggctttctgggctggagccaaggaccctccctgactcccacctccctttctgccttgtaccccagccaggtggaagagaccggagtggtgctgtccctggagcaaacggagcaacactctcgcagacccattcagcggggcgccccctctcagaaggacacccctaaccctggggacagccttggtatggggcagggctggggccgggaggggttgtgtccccagggcccttgggagaaagcccaagcaccttaacatggctcaccaggccctgtgggacctgcctcctgcctcccttccctgcgcactcagcctccaaaacacacagcctcctaagagcccttggaacactccagcctcgtgcctcagggcctttgcacatgcagtttcctagaatgctcttctctctcctgtcctccctccccttctgtggctatggggtggttgcttcagtctcttgctggcctctgctctaaatcctgctgtggctccacattgcccccacgcttctgcctcttccctgttctggctttgctgctctttggcttccagtaatctcgatcctcctaagtctggctcctttctccctcttccttcactctcctgccatcctggatgagcctccctcccagtctatccttcaagacctcaccttctccaagctgttgctggccacccatgctcctgggtgtggggtgggattgctgatataatatcctttccttttctggctcagagctggctctgggccttgtcttaacctctggggaccttacagcctccttgagggcttggggccagtcttttctcctaaggtgaaagctccccagagctgaatggccaaatgctgttctgagccaccaatcccttcccctcggacctttcagagcctcaccacaatctggccactgaagttcacacctgggctgggagcagtggtttatgcctgcaatcccagcactttgggaggccgaggtgggcggatcacttgaggtcaggagtttgagatcagcctggccaacatggtgaaaccctgtctctataaaaaatacaaaacttagctgggtgtgatggcgggcacctgtaatcccagctactctggagactgaggcaggagaattgctcgaacccaggaggcagaggctgcagtgaactgagatagtgccactgcactccattctgggcaacagagctagactccatctcaaaaataaaaataaagttcacacctggcccagcaggggtcctccaggccccttccttaccctctcactaagaacagtggccatcctgacctgctgaagatgtcaactgtgttcctggggttggtatggagggctctggcccttggccctcagtcaccagcccgtgtcctccccatctccatgtgtcctgcagacacccctggcccccggatccttgccttcctgcacccgccttccctgagcgaggctgccctggccgctgacccccgccgtttctgcagccctgacctccgtcgcctcctgggacccatcctggatggggcttcagtagcagccactcccagcaccccgctggccacacggcacccccaaagtcctctttcggtaagccatcccacccatgtgagccctcagcatccagtgctcagtccctcagggggtcttggcctgtgacttaaacctgactgttctctgggcctcagcttctccatctgtgtagtggggaggttgggatgagatggggttgaggttcctttaagacgcagatccagatttttcaattgttagaattccagagtctggctctgtttagggaaaaactctctcaagctatgtttttcctctgctctcctaataatgcaacaatcgtcaacacagaagaagacttctgtgaccaaatgtgggcagtttttcccacacaccaagcagcggacaccagctgggtgtcctccaattcaattccggcatcatctacctggagatagtgtcagatttcacaggttgggcctcagtccccaagactgctctttgctcttcagacaccagtcacaagtctgggcctccagaatttcttttttatttttatttttattttcgagatggagtctcactctgtcacccaggctggaatgcagtggcgcaatctcggctcactgcaacctccacctccgaggttcaagcaattctcttgcctcagcctcccaagtagctgagattacaggtgcatgccaccacacctggttaattttttgtatttttagtagaggcagggtttcaccatgttggccaggctggtctcgagctcctgacatcaagtgatcttccggcctcggcctcccagagtgctgggattacaggtgtgagccaccgtacctggctctttgggtttgattaatttgctggagcggctcacagtaatcaggacaacacttatttaggtttactggttcattgtcaaggatattgcacggatacggatgaagggatacattgagtgaggtatggaggaatgtagggtttcggagcttccatgccgtcccgggcaccaccctccagaaacctccatgggtcagctatctggaagcccctccaacccagtcctcttgggtttttatggaagcttcatgacatcagcattccttcccccagggtatcgggcaggaccctctctggggacagtggttttttttttgttgttttttttttgagacggagttttgctcttatcgcccaggctggagtgcaatggcatgatctcagctcaccacaacctgcgcctcctggattcaagcaatgctcctgcctcagcctcccaagtagctgagattacaggcgcacactaccacgcccagttaatttttttatttttagtagagacggggtttcaccatgtttgtcaggctggtctcgaactcctgacctcatgatccacccgcctcggcctcccaaagtgctaggattacaggcatgagccaccgcgcccggcctctggggacagtcttatgacccacaatcaaaaaggcaggggaagattagagacctgcctttgggcaggtgaaacgagggcagaagaaggctggagaggttctgtttcctgaggcctaacacacccagtgttctaacaaaagactgttagaactgttttactagactgttctaataaaagactgttctaacaaaagacaacggccatgggagtttgacccaggaaccatgcacaaaatcatatatatatatgtgtgtataaaataacaccacaggccctgtattagtctgtcttcacgctgctgctaaagacatacccaagtctgggtaatttataaagaaaaaaagatttaatggactcacggttccacatggctggggaggcctcacaatcatggcggaaggtgaaagatatgtcttacatggcggcaggcaagagagaacgaaaaccaagcgaaaggggtttccccttataaaaccatcagctctcatgagacttattcactatcacgaggacagtatgggagagaccacccccatgattcaattatcgctgaccaggtccctcccacagtgtgtgggaattatgggactatagttcaagatgagatttgggtggggacgcagccaaaccctatcaggcccctaacctgggatgtttggaactggcacagatgaccctcctcccactccagcttgtgactaagcatccagttctctgaactttgacctcaaagagtcaaagtgtctaatatcctgatttatacagacctggattaaatcctaaatctgccatttatcagccacgttaccctggctgggcaagcaagttcttgaggccttaatttcttcacctataaaagaaagataataacatgtcaccacatcattggttattctgagcattaagtgacagtattcatgagaagcactcagtaggggcctggcacctatcggtgctcaacagatcataccagttactatcaatatttgttgtgaagatagtctgacctttgacctcagtgggtccacgttatccagtgttgactgtcttcatccccactctccaccccaagaaaatatcctctctccagagaaatacagactgtgacctttgacctcatcctttacccctgagacagctgaactctccattgtttccccactaaactccaggctccaagacctttaaccccagaggatttgtttgaaagtcttggcctcaggctgggtgcggtggctcatgcctgtactctcagtactttgggaggctgaggtggggagattatctgaggtcaggagttcaagaccagcctgactaacatggtgaaaccctgtcactactaaaaatacagaaattagccaggcgtggtggagggcgcctgtaatcccagctacttgggaggctgaggcaggagaatcacttgaatccaggaggtggaggttgcagtgagctgagaccacgccattgcactccaacctgggtgacagagtaagactccctttcaaaaaaaaagtcttggcctcaagctcatgtttttatttatatatatatatatatacacacacacatatatatatacacatatatatatacatatatatatatatacacatacacacacacacacacatatattgtgtgtgtgtgtgtgtgtgtgtgtgtgtgagacagagtcttactctgtcacccaggctggagtgcggtggcatgatcatagctcactgcagcctctgcttcccaggctcaagccattctcctgcctcagcctccctagtagctaggaccacagatgtgtgccaccacacccagctaatttttgtacttttagtagagacagggtttcaccctgttggccaagctggtctcgaattcctgacctcaagtgatccacccaccttggcctcccaaagtcctgggattacaggtgtgagccactgagcccagccaggctctgatccttctaactggaacttccatgtttgccccatccatctatgtacacccaggcattctgagttttgaacacccaggttcaaaactcatctgcatttgccgttggaccccctttgtgccccagatgcctggcatttgatccccacttctacccttgagctgcagactgtcttaatgttgatacctcccaggctcaagatttcctgaagtttctactccatctctccacaggctgatctcccagatgaactacctgtgggcaccgagaatgtgcacagactcttcacctccgggaaagacactgaggcagtggagacagatttagatatagctcaggtaagggctggcatggaagggagtaatcctcagccctgtgttctggggattcacatatgtggctttagagaagggtagtgggatggttaaaggaatgaatggatggatggatggaccattgtattcattaggtggatgatggtggatgaatggatgaggtttaggcagatattttaatggatggatagatgggtgggtaggtggatgaatgtttggatggatattttgatagctggatgaaaaatggataggtgatacttggatggatgatttattgaatgcatagataaaatgacagcagcatgatgtattagttatctactgttgtgtaacaaattgcctaaaaacttaacaccttaaaacaacaactatttattatgtcacatggtgactgaatatcagaaattcaggagcaccttatctgctggtttttgctgagtctctcatgaggttgaagtcaaactctcagtcagggctacagtcatctggggttagagggttttcttccaagctcacacacatgaggttgttggcaggcctcaatccctcactttgctttggctggaggcctcagttcctcatcacgtgaacctctacatagactccctaagtgtcctcacaacatggcagttggcttccctaaggcaaacaatccaacaaagagaaaaagggacaaatggagaagtagagagatagaaagtacaagtcccagactgaagacacagtctttcatggcctaatctcagaagtgacaaatcatcgcttctgccatattgttttggtcatatagatcaatcctgtacactgtgggaggcaataacataagagtgtgaacatcaagaggcagggatcattgggaacttccaatgattgatgtctctccctcatgcaaaatacactcacccacctctcaaggccccccaaagtctcccaaagtttcttccccttacagcatcagcttgaagtccagaatctgatcatctgaatctggtcttggtgctggggaagctccttgagtacagttcctctcaacattttggcttgtggactaatggggacaagtcatctgtcacccacatactcaatatacagtggtgagacaggaatagacactactattcaaaaaggaggggtaagaggggcatgcatatatccctggtccatagcagttttgaaatccatatgggaaaatatcacaagttctttcattaggactttaaaaaaaaactgggggccaggcgtggtggctcacgcctgtaatcccagctctttgggaggccgaggcaggtggatcttgaggtcaggagatcaagaccgttctggccaacatggtgaaaccctgtctctactaaaaataaaaataaaattagctaggtgtggtggcacatgcctgtaatcccagctactcgggaggctgaggccagagaatcacttgaaccagggaggcagaggttgcagtgagccgagattgtgccactgcactccagcctgatgacagagctagacttttgtcccaaaaaaaatatatatatatataaaaatagagacagggtctcagcccaggctggtcttgaactcccaggctcaacctcccaaagtgctgggattagaggtgtgagccactgtgcctggcccaagggtgctcttcattgctctgagaccactttttttttcttttttctttttttttttttgaaatggagcctcactctatcacccaagctggaattcagtgacgcaatcttggctcactgcaacttccaactcccaggttcaagtgattctctggcgtcagcctcctgagtagctgggactacaggtgcccactaccatgcccagccaatttttcgtatttttagtagagatgtggtttcaccaggctggctcagagaccacttattaatgttagcatcatttgccatctggagggctcctgcagtcagccaaactcaaggttaatggcatggttctccagactgccaagtctgcccaagacttctgacatcagacacaagtttgagggtccccagggtcacccttactttagaccagctgcctaccaatgtggagattcccagactcctgtagactccctcaagtttgataatttgctagaagtgttcatggtactcagaaagtgctatacttaagattgtagttttattataatgaaagaatacagatcagaaacagacaaaggaagatattcataggtggaatctgggactggagggtcccagatggaaagttttcttctcctcagggacatgttgtcctcccagtattgacatgtagcaatatgtggagagtaatgccaactcaggaagctcaccaaagcatcagtgttcagagtttttattggggtttcattgcataggcatgattgagcaaattaccgcccatgtaattgaattcagtctccaatgctacctctaccttccctggatccggctgattttgtgcgggccaaagccccaaccctctaatcacaatggtggttctttctgcatggccagcctccatcctgagttatctcattagcaaaaactatctaggggctcaccatgagtcacctggttagcataaactatccaaaggacccacagtgaatagtaaagacactgctatcactcagaacattccagaggtttagaggttaacttccaggagctgggacaaaagccagacctctctttgggtaaagttaattattcactacacaaggaggttgagaatcttcaaaaccttcaagtactatctccttcatgtttaacatttcttcctttaggagaaatatttttttatctctctctcttcttgccttttactataagtaacaagatgaaatcaggcagccccttcaacactctggctgggaatcttagctggatcacctcgtgtatttgttatattttctactttccacataactgcaggcaacagtgttgctaaactttcagccactacaggacaaaaattctctttcctctggtttccagtgatatgtttctcacttctctctaagccctcactgagtcttctcaatgttcagattttgaccaatggtttctttgaggcatttaggtttgtttttttttttgagacagtatttcactctgtcactcaggctggactgcgatggtgtgatcatgctcactgcaacctcaaactcctgggctgaaacaatcctcccacctcagcctcctgagtaattagaactacaggcatgggccaccatacctggctaatttttttccttttttgtgtaggtgggggtctcactatgttacccagactggtctctaatttctagcctcaagtgatgctcccgactcagcctcctaaaagctctgggattacaggtgtgagctaccatgcttctgacccagtttaggatttctctaacatgttcttcagggagtccttatacccattttacagatgaggaaactgaagctcagactgttgaccacaggcacagaactcagaagtgatggtgctgggacttcagccaaggtccacccaagtccaaggctcatcctcttacctccctcctgccctccgcaggatgctgatgctctggatttggagatgctggccccctacatctccatggatgatgacttccagctcaacgccagcgagcagctacccagggcctaccacagacctctgggggctgtcccccggccccgtgctcggagcttccatggcctgtcacctccagcccttgagccctccctgctaccccgctgggggagtgacccccggctgagctgctccagcccttccagaggggacccctcagcatcctctcccatggctggggctcggaagaggtgagccacagtaaaggggggacatcaaggcagcatcccctcaccccgtcttgcccctgcctcctgcttcagcctcatccctcaccatttctctaaccctgatctctgctccagccaggccctcggtgggcccagcacatgccaagtttgtgccaatctctgtgcctttgcctaggctgtacaccccttctggagtgccctccactgctctcactgtttatccaaatcccacctgtcaaccagggctctctcctttggaacatagttatatctgatctggtgacaatttttgtcagagtttagaagacattgccgtgtgtcagagaaactatctaagccgggtgtggtggtgcatgcctgtagtcctagctacttgggaggctgaggtgggaggatctcttgagcccaggagatcgaggctgcagcgagctgtgcttgtgccactgcactccagcctgggcaatggtgagaccctgtcaagaaaaaaaaaaaaaaaaagatagagagagagagagagagtgaagagagaggaaggaagggaggaaggaaagaagaaggaaggaagggaaggagggagggagggagggaaggaatggaaaaaagaaaagaaactgtctagaactaaattgcaagcatgtgctcatttcgaatccagagtggtcttatccttatggatacatcttggtatctcccaaggctcccagcttggtactggctataaagtgggcctgataaatacttattaaatgagggagggagggaattattaatgaatatagttggcactttaatgggtggacaggtggatggatgcataggtcgatggaaggacagatggatggatgtgtaggtgaaagggtgtatgtatgtatgtgtgtatgtctggacggatggatggatgaatgatggatgtctgggtagacagaaggattgatggatgggtcaatggattgatgggtggctgaaaggaaggatagatggtggatggatggatgaatcggatggatggagggatggatggatggatggatggatggatagttggatggatggtggatggatggcagatggatggtggatggatggtggatggatgggtggttggattaatcaatggattaatggatggatgcatggatggtggatggatggatggatggatggtggatggttggcagatgtatggtggatggatggcagatggatggatggatgaatcaatggattaatggatggatggatggtggatggcagatggatggcagatgggatggcagatggatggatgggtggatcagtggatggatggatggatggatggatggatggtggatggctggcagacagatggtggatggatggcagatggatggatggatggatggatgggtggtggatggctgggtggaaggatggatggatagatgaaggacaactaggtggataaataggtggatgaatggaaggataaatggatggaggttgggtgggtgggtgatggatcattggatgaatgagaagatggattggtggatggatggatggactggtgggtgtatgactaaaggaataaataggtgctcaggggagtgaatgaatgctcatcacctgcttacactgttatccacacttgcccaggtttgctgtgtcctgagattcttgcctgttttcctccaggaccctggcccagagctcagaggacgaggacgagggagtggagctgctgggagtgagacctcccaaaaggtcccccagcccagaacacgaaaactttctgctctttcctctcagcctggtgtgttgggggattaatgggattctctggccctcattacctagctggcttaaacctactgttttatagataggaaaccagagaggggcaggggctggttgagggtcatacagaaagtcagtgggccagctgagactaaagcctgatcttctagtttcactaatgggtattaaaaacctctgcagtgaactgagattgcgccactgcaccccagcatgagcgacagaatgggaccttgtcaaaaaaaaaaaaaaaaaaaaaaaaaaaactctgcaaatacatgtaagatggcagtaagtcagctgggcgcggttgctcacgcatgtgatcccaacactttgggaggccgaggcaggtggatcacctgaggtcgggagtttgagaccagcctggccaacatggagataccccgtctctactaaaaatacaaaattagccgggcatggtggcgcatgcctgtaatcccagctactcaggaggctgaggcagaagaattgtttgaacccaggaacagaagattgcagtgagctgagatcgtgccactgcagtccagtctaggcaacaagagtgaaactccgtctcaaaaaaaaaaaaaaaaaaaggcaataagtgcaaagaaggaaaaattaagcaggctaaggggagaaatggcatgtggctggtatctgcagggatcttctctgctcccatgggaccccctccccaaactagaacaggtcttggccttggattactagtgcagagttcaaagtgcagacactagaatcagactgacctgggttcaagtcccaggtctgccacccagtaactgccacctgaccttgggcaggttacgtcaccacgtggagcctcagttgcctcatccagaaagtgggaatagttacatctcacgggactgccatgaggattaaaggaaattaggcccttagctgacactcagtgggctgaccataaatggtgtacaaaaacaaaccaaagggccgggcgctgtggctcacgcctatattcctagcactttgggaggccgaggtgggtggatcacctgaggtcaggagttcgagaccagcctgggcaacatagtaagatgctgtctgtacaaaaaaaaaaaaattaaaatttaagcgggtgtggtggcatgtgcctgtagtcccagctacttaggaggctgcggtgaaagcatcacccgagcctgggaggtcaaggctgtagtgagccatgatcgtgccactgcactccggcctagatgacagcacaagacgctgtctcaaaaaaataaaaataaaaaagccagcctggactatgtcacttctgcaaggcctccctctaggacctttcatggccctctagtgcttacagcagtgccctggttcttcactctgcaaagggttgtttgaatatgagatgtggttgataatataacagtttacaggccagacataatgcctcacgcctgtaatcccagcactttgggaggatgaggcgggataatcacttgaagtctggagttcaagtccagcctggccaacatggtgaaaccctgtctctactaaaaatacaaacgttagccgggtgtaggtgcacacctatagtgccagctactcggaaggctaaggcacaagaattgcttgaactctggaggcagaggttgcagtgagccgagatcgcgccattgcactcctgcctggaggacagggtgaaactccctctcagaaaaaaaaaaaaaacaacctctctctatatatatatatgtatatatgtgtgtatatatatgtatatatgtgtatatacatatataacagcttacacttattaagtgcctaccatgtgccagacactaactgcactaaattccttgcatgattaacttatttaatccccacaactactattgaaatgttcttgttactgttatacacacttacacagaagaagttaaacaactgtatcagagtctgcacaggaaaggcagcacactcagagggagtgttgaggagaatttaataacaggactgttgaaaaaggtgttaacatagtgtagggaaatcagcaagcctggtgcagtaccttggggcacagcatgggaagtgggcatcagccctggcctgaaggtgcagggcggggtggtcactggatcctgcagcgagtggagtccagctaatgagggctgaaaccttccatggagggacaccgccaactcacagagaagaataaataccctacctgctggtgtctcccatgagctaaccaacaggatcacacggagcaaagttgcatgctgtcacggtctctgtgtacaggtcctcgggcgaaggaagaaggagaagggggatgaggccctggaggaacacaagtaggatgactggacagggactgacccaaagtcacaccacaaatgggtggccactggacctcagcatcccttaactactgcaccatcttgtctttggatatatatttttttccttcctttctttttcttttcttttcttttcctttcctttcttttctttctttcttttttttttttttttttttttgagacagagtctcactctgtcgcccaggctggagtgcagtggcgcgatctcggctcactgcaaactccatctcccgggttcacgccattctcctgcctcagcctcccaagtagctgggaccacaggcagctgccaccacgcctggttattttttttgtatttttagtagagacagggtttcaccgtgttatccaggatggtctcaatctcctgacctcgtgatccgcccaactcggcctcccaaagtgctgggattacaggcgtgagccaccgcgcccggcctcttttctttcttttttgagatggagtctcactctgtctaccaggctagagtgcagtggcacgatcttggctcactacaacctcctcctcccaggttgaagcaattctcctacctccgcctcccaagtagctgggattacagacatgcgcaaccacaccctgctaatttttgtatttttagtagagatggagtttcaccatgttggccaggctggtctcgaactcctgacctcgaatgatccacccatctcagcctcccaaagtgctgggattacaggcgtgagccgccatgcccagcttatttcattttttaaatttttttgtagagatagggtctcattatgttgcccaggctgatctcaaactcctgacctcaggtgatcctcctaccttggccttccaaaagcactagaattacaggcatgagccactgcacttgcccttatttttattttacttttatttttatttttattagagataggatctctgtcacccagactggaatgcagtgacacgatcatagctcactgcaacctcagcctcctggtctcaagggatcctctcacctcagcctcctaagtaactaagattacaggcacatgccatcacacccagctaatttttaaatttttgtagagatgagatctcactatcttgcccaggctggtctcaaacgtttgggcttaagtgatcctcccaatcctctggcctcagcccccgaaagtgctgggattacagtcaccactcccggctgttccttggatactaatgatgatgatgatggtggtggctttgtctctctcccacagagtttccttctgacaggaggaccagccccagggagcctgcaggaccccagcaccccactcctgaacctgaatgagcccctgggtgagtagcaacctgggtatccagagccccagagcaccttctcccccgggaggtgcgagagggatggagccattccaaaggtgctgggggactgtcagtgcttggaggtgaccttggtggaaacggcagctcctgtctcttctctcttctcatgggcactgtggaggagagagcccctaagggaggcaggggctctccaaggctgccttttggggtggaagcccgagcctaggtctctggagcctgcacgcctatgatcacatttatttatttatttatttatttatttatttattttttgagatgaagtctcactcttgtcgcccaggctggagtgcagtggcatgatctcggctcactgcaacctccgcctcccaggttcaagtggttctcctgcctcagcctcccaagtagctgggatcacaggtgtgtgccaccacacctggctaatttttgtatttttagtagagatgaggtttcgccatgttggccaggctggtctcgaactcctgacctcaggtgatctgcctgccttgacctctcaatgtgctggaattacaggtgtgagccactgcacccagcctaaaaatttttttttaattggctgggcatggtggtgcatgcctatagttccagctactctggaggctgaggtgggagggtcacttgagcctgggagttcaaggctgcagtgagctatgatggtgccactgcattccagtctgggcaacacagcgagaccctgtctcaaataaaaaagagtgcaagagggcagggtgagtgtttcctgcctgtaatcacagtgttttgggaggctatggaggggaggatcacttgagaccaggggttcgagaccagcctgggaaacatggcaaaaccccgtctctacaaaaaatttttaaaaacctggtgagtgtggtggcacgcacctgttgtcctagttacttgggaggctgagacgggaggattgcttaagcccaggagttcgaggctgcagtgagctgtgactgcaccactgtactccaacctgcgtgacagggcgagatcctgtctctatttatttattttcacatttttattttctttctctctctctctcttttttttttttttttttttttttttgagacagagtctcgctctgccacccaggctggagtgcagccgtgcgatcttggctcactgcaggctctgcccccaggttcacgccattctctggcctcagcctcccgagtaactgggactacaggcgcccgccacctcgcctggcaaattttttgtatttttagtagagacagggtttcaccatgttagccaggatggtctcaatctcctaacctcatgatccgcccacctcggcctcccagagtgctgggattacaggctttctcttttttttgagaagggtctcgctctgtcactcaggctggagtgcagtggtgcactgtcagctcactgcagcctctgtgtccccgggctcaagcgatcctcccacctcagcctcccaagtagctgggactgcaggtgggcaccagcacacttgactttgtgtgtttgtgtgcgtgtgtgtgtgtgtgtttagtagagacagaatttcaccacgttgcccaggctggtcttgaactcctgagctcaagcgatccactcatctcagtttcccaaagtgctgggattacaggcgtgagccaccgcaccaggcccctgtctctaaacaaacagtccaggtgcagtggctcatgcctggaatcctagcactttgggaggctgaggcaggcggaccacctgaggtgaggagttcaagaccagcctggccaacatggtgaaaccctgtctctactaaaaatacaaaaattagccaggcacactggcaggcgcctgtaatcccaactactcgggaggctgagacaggagaatcacttgagcccaggaggcagaggttgcagtgagctgagatcacgccattgtactgcagcctgggcaacacagcaagactctgtctcaaaaaatataaatataaatataaacaaatgaacaaaaaagagtgggagatgaaaataagtgtaacggggaaataatgcatgcaaggaaaaaggtttggagtagggggatttcagttttaaacagtatgatcagggtggtttcattgagaaggtgatagctgagcaaagacctggagtgagtcctgacgatatcggggggaagagtgtcccaggcagagagaacagcaagtgcaaaggcccttaggtggggactgtatctatcttttttggggtgtggggggacagggtgtgtcttgctctgttgcccaggctggagcacagtggtgcgatcacagctcactgcagccttgaactcctgggctcaagcgatcctcccatctcagtctcccaagtagctgggactacacttgtagctgggactacaagtgcgcttcattacgtctggctaattttttaatttctgtagagaaagaggtcttgctatgttgctcaggctggtctcaaactcctgggctcaagtgatcctcctgcctcagccttccaaagtgctgagattgtgcctggctgtctctgtcttctttggggaaaagcaaggccaatgtagctgaagcagagaggagagaaaggtgagggctgactgcatggagcctctgtggggcattgtgatggctttgaagtcaccttgcttgaggaggctgcctcagggcctttgcatatcctgatccttctgcctggcatacttttccctctgttctttgccatgttaccacatcctttagatctcaaaccaaatattactccttacacaaagccctgcctaacttcatacgctcatggtttataacactccataattacacaggcctttgtgtcataatttgatgactgtctgtcttctcctttgggtatgagaccttcaagggcaggggccagggctgtctgggtccctgctgttctcttctttgtgcacatgggtgggcggtggctaagcacagaggaagttctcagcacatatttgtgaatgaggagctaagattcacgcactcgcactgtgcctagctttgtgctaaatcctctatgcacctgatccaattggcgcttctcactggagtgtcggtcccataagggcagggagattcatccatcctggtcactgctgtgtctctagcacctggcacagtgcctgacacaaagtaggtgctcagtaaacatgttgggttttttgttgtttttgagataggttttcactttgtcacccagtctggagtgcagtggcacaaacacagctcaccgcagcctcgacctcctgggctcaagtgatcctcctacttcagctcccacaagtagctgggactgcagctatgtgccatcatgcctggctgatgtttatatgttttgtagagacgaggtttcaccatgttgcccaggctggtcttgaactcctgagttcaagcgatccacctgccttggcctcccaaagtgctgggattactggtatgaaccaccacgcccgacagtaaatatgttttgaatgaataaactctcataaatgaagtatgtgtgagtatcctggtttcccaagtaacaacagctgacttaactgctttctcaccagtactagttatggttcaaaacaccttccatggatttactcatttattcctcacaacagaggagtaaatcaagagggaggtgctgttattagcccgtcttacagatgagggaactgaggcacagagagatgaagccacctgccccaggtcacacagcaagtaaatagcaatgcctggattcaaactagggcagcatctgactctggactcgggttcttcaccgcagccctgaacaccccagagaggttcagagagcagaacgtgcccaagacgtcactgccgtttgaatccagacaggcttgcctcaccacccaggcttttaactgccaggaaggggagacgggttggtgtgggatatgatgaggtttctcttcaaataacccgatcaatcttttattctttaattgatagtaccccccacctttttcccttcttctcctcttttcctttttgcctttgttaaatgcccagacacgccacaataccaggcgttatcaataccagctcacattcctttccttatttaaaaaaaggactaactttctaactcatcacagacaccccttcccctttcctctctgctttcttttacgtgtccaccttatctaaaaaaaaatcaaatgtttagccaaccgaaattagtttaaattgtataacccgaccccagccaataaaaaaaaagtacaaaaacaagacttgcgtcaaaaataaaggctcttgtgcccctttgttccagtgtgctctcatggcaactagccaaagaggcacccctctgcgcaaaagtaaaattactaaaaatcctttgttcgagtgttcaatttccttaagattttaaacattattcctgacattggggttatggttgtcctgtgatttatctttcgtcttttacctttcatttatcatttatctttcatctttgcaggcctgggcccctcactgctctctccgtactcagacgaggacactacccagcccgggggccccttccagccaagggcaggctcagcccaggctgactgagccggctcctctccccatctgccttctcctcccccagaaaggacctcaaccacactccacgccggcagccaacgcacaggatgggggcgccaggagaggggcccctctctcctctatgtaccccctgcccacctcgggcctacctcagccctcacccctctgcctgctcccaatctgggggctctctggggtggtctcagctcagtgacctctgggaggtggtccctggccccctcctccttctctcaggatttctcttggggttctcaatacttggttacctcattatccctttctctgcctctcttggctttattttggggaatcaggggtgaggagggttgggggggtcatatctgtgtttccaggttctggggagaacaatgatccacgggtcaacgtgatcacatttccttctatccttcttgtattattatttttatttttgtcaatttcatgatatggtttttaatcatgatgaattgcctggggtctgtaagaatgtgggactctgatcttccccctcttcaggtgtcagtgcggagaggctctgggccagacctcacccccagtgacttccgattgaggccaaagaccccaagctgcccgccagctctgactgccccttgcgctctgggcttcctgccgcccccagctttgcctggacactgacttcattcatggtcctcctacttcaggggcagcctcccagttcctctgcttccaaactatgcaacctccaacctgctccagttccagactgtataacctctgacctgcactggttctagaccacacaacctccaatgtggtctgctttagatcaccttcttcttcttccttcttcctcttcctcttcctcctgctcctcttcctcttcttcttcttttttttttttgacagagtcttgctctgtcacccaggctggagtgcagtggcgcgatttcagcttactgcagcctccgcgccctgggttcaagtgattctcctgcctcaacttcccaaatagccgggactacgggcatgtgccacattgcccggctaatttttgtatttttagtagagatggggtttcaccacgttgtccagtctggtctcgaactcctgacctcaagtgctccacctgcctcagccttccaaagtgctgggattacaggcgtgagccactgcacccggctagaactcactttctccaaatccctctgcttcgaatttcaccgtcttcagctctttctagttctgggcctcaccagcctctcattctgcctgttttcaaaccttacgatccccaaaaattgtctggttctgggcctctaactccctctggctctatagtctatgactaccagattcttttggttctagaattcactaacttcctctggttctagacctcttcctataaattaatccctcttgttttagatctcacaccctccaacgccctccggttccagatcttatattcagtgatttcctctggttctggaccccacaactccaagcttcctattggttccagttctcctgatcggtaatacatttggttccaaatccagacctcttaatctctctctttttttttttttttttttgagacagagtcccactctgtcacccaggctggagtacagtggctcaatctcggctcactgcagcctccacctcctgggttcaagcaattcttgggcctcagcctcccaaatagctgggattacaggcatgtgccaccacgcccagctaagttttatatttttagtagagacagtgtttcaccatgttggccaggctggtcttgaactcccgacctcaactgatccacccgcctcagcctcccaaagtgctgaaattacaggagtgagcctggccagacttcttaatttctaaatcacttttgttttagaccttatgaggctcagcttattcttctgcagttctctataaccaagactcattttctctcatcaaaaacaagtacagagagtttgatgtgtttatctcttttttcttcctcttcttttttttttttttcttttttgagatggagtctctctctgttgcccaggctggagtataatggtgccatctaggctcactgcaacctccgcctcctgattcaagtgattctcctgcctcagcctcctaaattggtgggattacaggagcccaccaccacatccggctacctttgtgtattttttagtagagacggggttttgccaagttggaggggctggtcttgaactcttgacctcagatgatccacccgcctcagcctcccaaagtgctgggattacaggcataagccaccgtgcccgaccctgtccttatcttataataaccagttcttctagaaccagacgatgctctagttctcctagattctgaacctcatgacctgtaccactcactagttccagactacacaacttctagaaggtgccacctccagggtcctgattcaagatctggtgatctgctgtttctctggttctagaactgacttacaagtgccttctgattctagacctcattccgtaagttcccttggctctagacttcatcatttccagctcctcctcactcaagatctgactccaaattaccctgggtctagaattcagccttcaaatatcttctgattttagactttgccttatacatttctctggttttagatcttaccaccctcaactccttctgattctagatcttatggttcccaaatctctctggttctagaactcagattttaggcttttgtttttccttttttttgttaaaaaaaaaaaaatagagacggggtttcaccatgttgcccaggctggtcgcgaactactgagctcaagcaattctccctccttggcctcaccaaagtgctgggactacaggcatgagccactgagcccagccaggctttttctaattctatgctttattctataaattcctctgcttctaagcctcacagcttccaactgcctttgatttcagatccaaattcctctgattctataattcagcctccaaatgcttctgattctggaatctagacttttccctaaagattcctctggttctgaatcttataacctcaactccctaattccagaccccagcctcctaaatctattctgggcttcccaccccactgaacttacccaattccttctttcagtcttaagttttcccattctaaacccctaccctctaggctgtgctgctcctggacttcatgcctctccattctcattgcctacaatctctgtgccccagaaccccctccacttcccaccccagccctccagacatgcacttaccttgactttaccccacatgtttggggcacctggggctccctcaccccttgggtggtttgcaatctgaagacttctccagccacacaggcacatgcacaggcacggtgctgtctgcatattgccaggtggggagagaagccaggacccctcagctgtctgccaccatctatgtgcctcccttaccccccagctttctttctacagatggtgctactcttggtctcccacaggaaaaggcctccccccttcttagccccatttaccccgtttgtggaaggcactgctcgctctgttttgtcagagagtggcctatccagattggtgctatgggggggtctgacccctccctcctccctctggaggtgatgtgggccctcaatggagggaattgtgctgggctagggaaaggggagggactagactggccacactggctctgaaactcaccaatctctatacaccataaagacctcaccttggtaggcaccagagctctgcgtgttgactcatcttttggatctcctctgggagtgtgggtgcactggtggctgagtgtctttttttttttccttccttccttccttccttccttccttccttccttccttccttccgctctctctctttcttttctttttttttttttcttggagtctcactctgttgcccaggctggagtgcagtggcacaatctctgctcactgcaacctccactacccaggttcaagcgattctcctgcctccgtctcccaagtagctgggatttcaggcatgtgccaccacacccagctaatttttgtgtttttaatagagatggggtttcaccacattggtcaggctggtctcgaactcctgaactcaggtaatctgcccgcctcggcctcccaaagtgctgggattgcaggcatgagccaccatgccaggccctttctttctttcgagacagggtctcactatctcacccaagctggagtgcagtggtgtgatcacggctcactgcagcctcctgggctcaagcaatcctcccatctcacccttcccggtagctgggactacaggtgcatgacacgaggcccagctaattattttcatttttttgtagagacagagccttaccatgttgcccaggctggtctcaaactcctgggtttaagcgatcctcctgcctcagcctcccaaagttctaggattataggcttgagccactgcaccagccccatgttactttctgattctgtgtatctgtatgtgtgtgtgtgtgtgcatgcacacgagtgtgtgcacagtgtcattctgtgtatgtgtatgggtctttgtcacattctgtgaacctgtgttgcagcaggtgggtggggttgtgattccttctacaagtgcatattagtatctgggtgaagtgattctgccttatgtgtgtttctggttattttgggtttctgtgtttctgagtgtggaaggtgctgtgattttttttttttttttttgcctatgtatgtctgtatgatgtgattctgtgtacatgtgtgggactgcttgatgctataattctgggtaccaatgtgtgtgtgacatgattgcccatagttaagtgagcatgtgtgtgcaagagtgtgtgtccatggactcatgtgcaggtgggtgtgtctgttgtcatgtacgtcactctcataaccccccatacagggttgcacataggaatctcttcaagggaagaaaaacactctcaagcctttgcacttcctattcttctgcctgaaatgcctctctcccttcccctctcccctcacttggttacctcctactcatatttcacatcttggtttaggtaacagctactccaggaagccttccctgcctgctccaattgggtaaagtgcccctaaaagctccccttggaagccccctcccatcacagcactaggcactctgcccaactctgaatatttgttttgttttatttgttttttgagacagagtctcactctgtagcccaggctgtcgtgcagtggcgcgatctcggctcactgcagcctccgcctcctaggttcaagcaattctcctgcctcaacctccctaataactgggactataggtgcgcaccatcatgcccagctaaatttttgtatttctggtagtgacggggttttgccatgttggccaggctggtcttgaacttctgacctcaagtgatctgcctgctttggcctcccaaagtgcttcgattacaggcatgagctaccatacccagcccactttgagtatttgtgatggagtgaatataaaagtactactctgtgtcaggctccctgacaaatgctgtactcatgttgtcgaactctcctctaatcctgtatgatggggataattattatccccactttacagaggttgaaactgaggcttagaagagggtgatcacttgcccaaggtcacagtgtcaggaaggattccgctggactcgaaaccagaattcaaatccactatggcagctccttttcccccaaccccaaaacaaacaatacgaacaaacaaaagaaaaatttactaacccaccaagatgggctctggcacctacagaggcagtagagtggcaatgaaggacataggaattagatgggattcctgatcctggctctgtcaccttcttatgttgttgtgaccttcgtcaaacacctctgcaagtctgtgtctttatctgtaaaatggagatgatactaatatctgccctttagggtgattgttggttgtgctgggggccagtaggagagatggggttggactaacaagaggtttgggagtgggatagataggtttaggagtgtgcttccaggaggggatccagagccttacaggacttagtgctacatgagggcttagaaaggacagactggaagcgtgtacggcgggtggggattggcaaaggggtggaatctggatattagactattcagcctgaggttaagactattcagggtctcctaatcaggagtttgggttttctcctaagggtgctggggccatggaagcctgggagcgagagtgtgccatggttttatcatgtcttagaaagatccctcggccgggcacggtggctcacgcctgtaatcccagcactttgggaggccgaggcgggcggatagcttgaggtcggcagttcgaggccagcctggccaacgtggtgaaacccgtttctactaaaatacaaaaattagccgggcatggtggcgggcgcctgtaatcccagctacttgggaggctgaggcagaagaatcgcttaaaccgggaggcggaggttgcagtgagcctagatggcgccactgcactccagcctgggcgacagagggagactccctctcaaaaaaaaaaaaaaaaaaaaaaaaatgtgaagggtaaactggagggaggcagagtgcatgcaatcaatgctgtgatctcagacaagagaatctgtaaaaacacaaacaggagagtttatttgaagattcaggatttgggaagctgaacacaggaagaaaggagatggtgcaacacacttctaagccttgctcaggacttgaaatccagagtgccttcagttaaaaactcaaacactgaccctcaaggttggaccctttttggcttgagaaaccactaatttttcagagatgggtaactgagaccctagagaggaagggaagatttgttcaaggtcacacaggtagtcgacaatagggctcgacgcccgggtccggctccgcgtagggcatggcgctgccttgcaaaacagccacacccgccagcgacattcacaacccaccccccaaccctagaggacagcggggaaatcccactttcagaaccgagaaactttttacagccttggaacacggtaactttgggaggagaggccacaccaggtctgtttccccgcgcgccccttctctcattccctattggctctctctaccaggggtaccgtctggggaacctctggtcaccttgtcctccgcgcgctctgtggcgaaagggacctgcgcaggcgcgtgaagggcgccttcagggcccgcgctttacgacacttgtgcggcagcggcggcggccacccggcgctccttcgcgacggttcggccgggtgccgctggcggccgttgccagggtaggggtcgctttgcggcatggcgatggcggagggcgagaggactgagtgtgctgagcccccccgggacgaacccccggctgatggagctctgaagcgggcagaggagctcaagactcaggccaatgactacttcaaaggtgcgcccgcctggcagggagggtggacagtggcccaggctgaggggtgccgggcccgcgcggaaccatagcaacgcggagctgcagcctgggcgcggggcagacactaccaagtgaccgggcgtggggaggcccaggatggcgctgccaaggagcgacatagggggcttcggagagtgatacctaggagtggcgtgcggagcgggtgctactcagtggagagactgaggagggcgccaccaattgtggggcgagagggggactggaatgagggcgctaccaaacgtgaggcctgtagagggcgctaccaggcagtgacatgtggtgggggagtgattgatggcgctaccaaatggggagtcctggggtgggtgccgccaagtggggggtagagggggcacagccccaatagagaaggcaatcgtgggggtggggaatggatcattagatggggggaacaaggaagtaggagatttgggctgacccgaggaaaaggaatgtgatggtgggggccttgggagtaagggtggggatccttaagaatagtatcacttagaatattgagagtcaagtgtggggcacccattcattcattaattcaacaaatatttattgagtacctgttatgtgccaaggactgtgcttgactttggggatatagcagtgaatgagacagatgtggccctgtccttagcttgtaattttgcaggtgaaccagacatgaaaaaaaaaaaaacaaaaaaaaaccatgtaaataagtaaaatacttaaattgtgatgagtgctttgaaagcaaaccagcagtgtgatgaagtagagaataagggttggaggctactttagatagggtagtgggggaaggccttactgagcaggaggcgtttaagctgaaactcacagagggagaactggagaggagtgttccagggaggtaaagcagcctgtgcaaaggccctgggatggggaatgaaagggtactggcatggctggggctttggctacttagggggagaccaataacaagatgagattaggacagaggccagatcatgcagggtctccgtgagtcattacaaagaccagtttggaattttttttttttttttttttttgagacgggagttttgctctttttgcccaggctagagtgcaatggcgcaatctcggctcactgcaacctccgcctccctggttcaagcgattctcctgcctcagcctcccgagtagctgggattatagacgcacaccaccatgcccagataatttttgtacttttagtagagatggggtttcgccatgttggccaggctggtgtcgaacctctgaccgcaggtgatccgcccatctcggcctctcaaagtgctgggattacaggcatgagccaccacgcccagccctacaagaagacacattaagtaaatgggccagtctggactggagaagaatttgggtgtgatcaaactatggttgggaatggatgagatcatctagtaagagggtctagaggggggacttaggacagaacccaaatggaagagggtgaggctaaggaggagcacttagtgaggtggaaaggaagccaggaaaggtgtcgggaaggctgagagaagggagcgcttctagaacaaggagctggtgcctttagtccgatgctgccaaggcaagcactggccattggctttggctccatggatgctggtagtgatgttgacaggagcagttattggggagtgatgggggtgatgcagccaggaggtgctgaagagtgaatgggaggggaggaagtggagacagcaaatgttaagtgttaggagtattggttctgaaggggagtggagaaatgggggagggtggtaagacgagaacgtgcacaggagttcgagaccaacctggccaacatggtgaaacgacgtctctgctgaaaaaattagttgggtgtggtggcacacacctgtagtcccagctacttgggaggctgaggcaggagaattgcttgatccttggaggcagaggctgcagtgagccaagatcacaccactgcattccagcctgggcaacagactccgtctcaagaaaaaaaaaaagagagaagatgcagtgtcagggaaagatggattttttgtaaggatggaagagagtagagtccaatagagatggagaattgattctgcacaggagaggggggacttgcagcagcaaaaccctggagaaggcggaggtgggaagggtctggagccctggaagagacttggcctccaacgggagcagaagcaaagtgtggagaagctcgatccggtgggagccgtgagagggaggtaggaccagtgagagatgaggccagaggtagaaccttggaagtcagattggggaatatgggtgtcatcctgggggtggtcgatgccatgggaagtttcaagagcggggtgctgtggttcagttagtgttcagaaaagatccctggctgccatgcagagactggactccagggtaagacaggaaggagtctagattagtggacaggtgaggaggggtggtgatcgccagccaggctggagggacagaaatagattcaagaagtgtttcagggaggaagtgagagtggctgcctggagagagggtggacggtactccaggcagggaaaaaaaaaacaaaaacaggtggcaaaggcccaaaggtgagcagagccaggcatggaggccataagtggggccacagcgtaggaggctggaggaggttatgatgagtttgcagggagtagattgcgcagggctgtaggaaggagccagggctttctggggtggggtggcggtggggggtggggctctggggagccctgggaggttctgagtagggaaaggacagggtcaggtttgtgttttaggaacacccctctggaggggcaggacaagaggctgcgaggccaggtggaggctgagccaggaacctgggcaggagaggccagaccagggctgggtggggctggagggtgagaagggagtggctgaatctgagagatgttcaggaggctgacttggcagaataagtgaagtgactaccgggctttgggggctgagggatggagaggagtccaggatgaggctgtctcagccaggtgatggggtggaaggtggaattccctgggatgggagcagcctgcatgggggttgctgctgaggccgcatcagaattctgggccacagcagccattgggaggagcctgttgccccccaggacctgggatccaggctctcaggagtcctggggctgggcaggcagccagaggggcctggcactgagctggcacggaggagaacggccctgctggcccaggccccttgctgtctgtcaggcagtagcaggcacagagccccaggctccagggctgtgggaataacaataaaaaagaataatgacagctcaccttaattgagccttgtggccaggtacgctgtggggtttaatcctccccgggggctgggagatggctaggagtggccctgtttgttttataaaggaagcaaggctcggagaagtgaaaaaaccactcgcccaaggtcagagtgtgtgagcagcagggcccggatatccccttcctcgccacgtgcttggctcccacgttcaggttcctcccagagctgtactggccctgttgaggagaagaggggccccagcagggagaagagaggtcccagggctcagaggactgtcccctcaactgtggctggttgctctgtaagttcaggcctattccagaaatcctgggggcagagcctcgtcccccgtctcatgtctgagtctaagggaagtgtctcaactgtcttcccctctctgtgggcctcagtgccccgcttctgtaaaatggggggtgggggcttatgcttaacccctaaggaggctccaggtataagagcttgtggggaggaagcaggccatggttgagagctcaggctgcctgggttcaaaccctatgtcttcctttacctgcttgatgacgcctgggcaaatgacttaacttctctgggcctctgtttccttgcatctaaaatggggaatgtcttgaggcttaaatatggtcctgtttgtaaagcgcatagaacagggccaggatatggcatgtgggtcgacccgtggagtacaggctcctcccatttcctcttgttcccttcacttcctcccttcatttagtcattcacgcattcacttcttttgcctgcttcttttgctgcagccagttttcttacacaagttcgtaaaatcctcacggccacccagtgaggcagagctcagaaagaggaggctatttgcctgcagcctcgagttagagatctgcagagccgggtggcaggccctgagactccaggatcccctccctgtgccactggagtaacagctgccccatcaggagcgcgggccaggcagcctctggaccacagccaggaggcctgaaggagtcctcaaaggcgctggcattccagggagggtcggtcagatctgggctgcccagttctgcccttgtttgtttttgggaagtcccgggccctgccctcctggggcttacagctctggagggacacactcattactcaacagtgacgatgagagtggacagggctggcacaggagatcccaggggctggggcagcccagtcgggggcctgacccagcctgggagtaaaggagggcttcccggaggaggggacatgtgagcatttgaaagattgccaggagttggcgtggcaaagaggaatgttgttagattgttgctggccacatccccaggacccggcttctcccttctgtaatgtcagtcctcatctctctctgcatccctccttcctttccctctggagccactcatggagcctgggactctcttcttccatctcttcaaccaactgactcccatcctccaggtctcagccccagtgtcccctccgagctgccccaaccctaaacactgggcaccactgtctagggatggatctgtctcctccactggatggtaagccctgggagggcagggctgtgtgtaagaaggactctcggagtgctgttgagaacattaaaatgggagtgagggtggggactctgtgcagggctgctggtagaaggactctaggaaaccctagtccacagggggttcctcagtagcccagggatacccaggtagtaagaggcagagctagggactgggcccaggccacctactcctgcctctgtgcttacccctgtgccacgctcctgcccagaggtcaccatggcatggggcgtgagagtgggagccttttggtcttggcctggctcagaaggcccacttctcggccaggcgctgtggctcacgcctgtaatcccagcactttgggaggccaaggcaggaggatcacgaggtcaggagatcgagaccatcctggctaacacggtgaaaccccgtctctactaaaaatacaaaaaattagccgggtatagtggcgggcgcctatagtcccagctgctcggggggctaaggctggagaatggtgtgaacctgggaggcggagcttgcagtgagcggagatcgcaccgctgcactccagcctgggcgacagagcgagactccatctcaaaaaaaaaaaaaaaaagaaggcccacttgtcacctgctgtgtgaccttgagcaccggcctttcttccctgagcttcagtccccagatttggagacgggggttaatgtagtttccctgggcttgtgagagttcagtgaagggggacctgtgtactaaagccctgcatggctctggtacatcacggcccccagtggggacaagcctctaaggctgtttaagccttggctctcctgcctgtcaaatgggcacgagggagggatcaagcctggctctgcaggtgcagacagggcatttgaccttgagcaagacctccatggcttgtctgtaaaatgagcaccagatggtccttactcccgtggagacatgaggattccacaggtcacgaggtaaagtgcagggtacagctatagctcatctcaaataaaatccgacctctcctccttggccagatgtcacatcctgtcactccacacttagaacatcagtgtccagacctcactgtggctgcccggggcccagggatctgtcccaccagcctccctgcctcatctctcctccccctgcccactccacccagctgcctcagctctcactggccctcagacaaggctcaaccacctctgggcctctgcacctgctcttcttgctatcggagtgctcttccctcagtctgctgctagtgcccagcttggggctggaggggtgggtgggcgggtgtgtggagtcctggagactgtggccgagaggacaagccctgagctaggttggttgggacaggcaggaggggcaggctgaagagatgtctctgggctcagggtagccctcagcttccccatctgtgaacagggagactgggcgtcacccagcccagggcctgtcctcgcagggttggagcactgcctcatgcctcttcttctgtctccgcagccaaggactacgagaacgccatcaagttctacagccaggccatcgagctgaaccccagcaatgccatctactatggcaaccgcagcctggcctacctgcgcactgagtgctatggctacgcgctgggagacgccacgcgggccattgagctggacaagaagtacatcaagggttattaccgccgggctgccagcaacatggcactgggcaagttccgggccgcgctgcgagactacgagacggtgagctggggagtgggccaggcctggcacctgagccaggcagatactgagggctgggctggcggggacgggtgtgaggagccattcactcctctacttaccactcagccagccagcaagtgcctgtggggccttgggcccaggccagagtacccaggccacagctctgctcagccatctcacattttgtgaccctgagccagttaccccgcctcgccacaccttcctttccatatccgtgaaatgaggagaacaagaggatcagcctcaagggtagcggtgaggaaaagtgagcttttgcctttcacacgagtagaccagtacttggcccggggtcagtgtcctgtgatggttcacctgatggttactgtcattgttagtgctggtgctggacaggagccacacagcctctcttcttctggtggagcttgtctttcaggggcaggcagaaaacccaccactgaataggttagcagaataattgcaggtgaggatctgcactttgaagaaaagaggaagggcagtcgggcacagtggctcacggcagtaatcccagcactttgggaggccagggtgagaggattgcttgagcccaggagtttaagacaagcctgggccacatagggaggagacctcatctctacaaaaaatacaaaaattagccaagcgtggtggcacgcacctttagtcccagctactcaggaggctgaggcaagaggattacttgagctcaggagctcaaggccgcagtgagctatgctctcaccactccactccagcctgggcgacacagtgagaccctgtctcaaaaaaaaaaacaagaagggtgatatgctgccagggacagcagacaggatatgtgtgatatgctgatgagggaggggacctagggcacagtgagaattcgctagtgccctcacccacctaatgaaaatcctgacggtatgaggctctgcagagcgagcacacaccttcacaccaggtgtgctctgcatcttccttcagggaggctggctgaatcattacagcaccctgggacgtgggaactgggattactccccttgcacagatgaggaaacagtccctaaggggtgaagtcacctgcccagtgacccccacctggttagtagcagagctgggatttgaacccaggaggcctggcctcagggccttatctctcccacctcagagttcgctccctgagacggggccgtgcgcttgtcctgcgcatggggatggtgcagcagggggcttggtcagtgtgtgtcgagaggattgttatcctgccccccgacacagacacacttcactccctccttcccttgcaaccatcacactcggagctgcttgtgtcgtgtagggaggggcaaccagggagctgggagccgcgagtctgcagttggtcgcggggctgagaagcacgagtctgcagtcggtggagccagctcagacactgtcctggctgttggccgctggcctggggtggagggtggacttcaggccaggtgaaggcttgagctaagcatgagtccaggggacacatgttaggatgggggcagagatgtggcggggggttagggcgacacctagaagggtgggggcaggggcagcagagcagaggccttcccagcttgggctcccaagccattcttggccaagcccctccctcattgtctcttcctgtcctaatctagaaaatggtgacaagaggagtggccgcctccggatggctgtggctgtgatgacatggttgagtaaaggtcacgagctgcagggctcagtaatgagtaaccaaggacagtcggtgttgggttggggcagggctccaggtgggaagggggcctggggagacagtggggcagaagagaggagccccaaggacaggtttagggcagggtcttcatctcgtgtggggctgcaggagcatctttccccagggtaaggagcaggggctgcaggcagggtcttcgtcaagtgtggggctgcaagagtgtctttccccagggtaaggagcaggcttttcaagactctggcccagtctagggcccaaccccgcatactcccaaccccgcatactccctgaggctgggctggttggcttcagccatcttgtgggtgtgccacgtctgagctgtgtcccaggcctggcggatggcagggagggttgagggggtggggaattcagagtcttttacagaatacccagcacctaaattgtcatggcccatttccccatgggggctctcccagcagcattggggacccccacatgaacatgagggcttacctgtcatcaggccatccatatgcctgcaggccttcagccttgctcctttctgcgcagttcttcaggctccatgtgccctggggcagttcatcttcccaagactctacctcctgcttgctggatgctagagtttcctcctagaccagaagctcgccagggaagcagagcaaagacgtgaccttggccttgggcgggggagctccccttagcctcggtttcctcagcggtctgctcactctgggcccagcactgctgggagccctttgtgcacctgaattcagcctgaattcagactgaggcctagagaggagatgtccctcctccaaggtcacccagcagggaagtggcagagctgagacttgaacccctagtccatgcttgtaactgtttctgggccacaatcagttgaatagcttcagcacttttgtcttcatcaaacagagaattaaaaacggttcattgtttggaggaagtgtgtataaatattgttttgtggaaatgacttttcatttacacaagtacagatgagtgatggatgtgatataaaaatccctattttacatgtgggctgcaggcagagagtctgcggtcaccagtgcaggggctagatggggcaggctctgggctcaggacgcctaggttcacagccagctcagattgggtagcagctgcatggctcctagtgccttttttctcagccttagtgtcctcatctgttaaaggaggtgagaatataggaataacaaccaaagtgttttttctttgtttttgttttttgttttttgtttgagagagagtcttgctctgtcacccaggctggagtgcagtggcacaaatcttggctcactgcaacctctgcctcttgggttcaagcgatcctcccacctcagcctcccaagtagctgggactacaggcgtgtgccatcaagcccgggtaatttgtgtaatttttgtggagatggggtttcaccatgttgcccaggctggtctcaaactcctaggcttaaggaatttgcccaccttagcctcccaaagggctgggcttacaagcatgagccatggcacccggccccaaagtgttttttctattctctcagtcaacagttacacagaaaatttctgtgaccactggtcacgaaagggagtggaggtctctccctaccggcaaccaagcagtcgattctgcagtggacaccagctgggtgttctcttattgaattaattctgacactatctgtccagagatagcattagattccacaggttgaggacttagtccccacttgtcccttatttctgatgctgatcacaagacctaggttattttgccggtgattctgactgactggctattaattagggtttctgtgacccactccttgggttcaattaatttgctagagaactccctcatggaattcagagaaacacatttaccagcttattataaaggctgctacaaaggatacagatgagatgcgcagagcaacgtgtgggatggagtgcagagcttccgcgccctctcctggagcaccactcttcaggaacctccatgtgttcagctattcagaagctccctggacccagtcctttcgggtttttatggaagcttcattatgtagacatgattaattataccattggtcattggtgatcaacttaaccttcagcccttctcccctcccggaggttggagggtggggctgaaacattccaaccttacaggcccactttggtcattccagtgaccagcccccatcctgaagctacataggggtggctagccattagtcaacacatgagcatgcaaaaagacacatcactttggagattccaaagattttaggagttatgtgccagaaaacagtacatgatgaatatcaaacctgtatttcatagtaccactggccacccgtggtcttcaaacacagttccctcatatccaaagaatatacaactcaaaaggtattactggccagtttgttactagaactccattaggtcattaataattagttcatcatattatatgattatgtctcccagggtgagaccagtcaggtttgcaggtttctattcagtcttgccaatttccaaaagcaggcgtgatctcagcaaatatatggctcccccctttcaggcattaggtataattgagataagagacaatgtcacccttgttctgagcctctttcaaagtgttaatgtaatactggagatttcttaattcataactcatttattcattcgtttaccctcgtaaatgttcctccgtttcttcatttatacctgttgtcctaaaggaagaaactgaggcaaaattaatataagtagagattttatttgggccaaggttgaggaccagcctgggagcctcaggttatctcgggaagtgctccagagaacagataagctcaagcgtttaaagacaaaaggataaatcggggaggagtgattacaaagggtgtctttcaggaattctcattggtttaaaaaataacattgatcagtaattggctctgcgttattaaattacagggtgtaagtgatggcatccgtgtatggcattgtgaggttgatgtgtagctgtctctggactcttactcttgagtccacagggtcagtggcttcgggggatgagtttttctcaagatggggagtgggacatgactgctccctcattccagttcctctctaggctcaatcatttaaagggggtttgcattactcaaggaaaagtttcttttctttctcatttttcccttttggtcaaaatctttctttttaaaagcattgatcagagtctgagtgtcagggtgtccctcgtcactaggaaggctcactttaggacaggcctgttctatgttggggagggggaaggagatggctcagtgaggaattttcagtgtgtccaaaagctgaagtaggatggcctcacagagtggcaaaaagaagacctgaatcaagtcactgatttatacagctgcgtctctgtgtccaatcatctctagtcttcagaataccatgattttcattttctcggaagtaaaacaagaagattagtaatttaaatagtagaaatataatgcacataaggattataatgaaaacaagaatgtatatgccagaatgaaaaaaagagccttttccaattagggagccagctaaaaacatgaggaaaatgaaacccagcttctgctttggggacttactgtagccaagatagaattcaagattcagtacaaactgtaggcaagtaataaaaacccaaaaacagtggtcagggctagaatctaaacacagatgtgcaactgaagcatcatttttcctttccagtcccccagttttaccaaagacactaataatagcaagaccaatttattctcaaaataagttttagtgttatactttatttgcataaagtacagcaagattagtgactgaccatatagactccttttaagttggctttcccggaaaatgaggaatttcggattagactttttttttttttttttttgaggcggagttttcctcttgttgcccaggcaggagtgcaatggcgcaaactcggctcactgcaacttctgcctcctgggttcaagtgattctcctgcttcagcctcctgagtagctgggattacaggcacctgccacacacctggctaatttttgtatttttactagagacggggtttcaccacgttggccaggctggtcttgaactcctgacctcaggtgatccacctgcctcggcctcacagagtgctgggattacaggcctgagccactgcacccggcctgtaagatactttttgagaagaattaaagtaaaacaataattgcctgtgtatgacagaggacttagaacagccatggttaaagactcaattgaccaggaaatttggctatttctgcagcatataatttaacataataatcataattaataactgataacatatacgaggacatagtttcttttttagaaatctgtacaattttggaacatatattaatgagacccatacaaatataacaaaaaagatcagcaccatttcctacgtgacaatacttcccatatggtttttaacatcccagataagcctaatatgtctctcttggtcttccggggtccctgacatccagaagttagttcgaggtcaaaaagacttaattttagaatttgaaattagatttttctttgaaattagatttttctttttttttttttcttttttggagacaaagtctcactgtgttgcccaggctggagtgcattggcacaatcttggctcactgcaaccacggcctcctgggctcaattgattcttgtgcctcagcctcccaagtagctgggattacaggcatgtgccaccacaccccgctaatttttttgtattttttgtagagacagggttttgctatgttggccaaggtggtcttgaactagcctcaagtgatcagcttcagcctcccaaagtgccaggattacatgtgttagccaccacgcccagccctgaaatttggttttgtaaaccctacaaatgcatcaaaggtttgaaacacttaatcaaaataggatcacacatcactgtgaaataatatagtcattcatttagccaaagtgttaattagaagatttcaaaaagcaaaaacctttactctttggtagagaggagactcagtttcccaaataatcaaaagacctaataaagacagcataagagcaacagaatctttctctccctctccccttttttgttttttctgtgttgtttgtttgtttgttttttgggatttttgttttgttttgtgttttgcaatttacccaaaagataagtgaaagaaaattttttttttttttttttgagacggagtctcactctgtcgcccaggctggagtgcagtggtgcaatctccactcgctgcaagctccacctcccggattcaccccattctcctgcctcagcctcctgagtagctgtgactacaggtgcctgctaccacgcccagcgtattttttgtatttttatgagagacggggtttcactgtgttagccaggatggtctcaatctcttgacctcatgatccgcccgcctcggcctcccaaagtgctgggattacaggcgtgagccactgcgcctggctgaaaaatcttttattatcttttactaatactacaccagccgggcatggtggctcactcctgtaatcccagcactttgggagactgaggcaggcggatcatgaggtcaagagatcgagaccatcctgaccaacacggtgaaaccctgtctctactaaaaattaaaaaaaaaaaaaaaaaaaaaaaaaattagccgggcttggtggcatgtgcctgtagtcccacctactcgggaggctgagacaggaaaatcacttgaatccgggaggtggaggctgcagtgaggcaagatcgtgccattgcactctagcctggcgacagagccagactccgtctcaaaaaaaaaaaaaaatactataccaaaattttgctcaaaagagaaaaacaaattcttcctttgcatcaatgtattatttatggtaaagctaattttaataaaaccttataaacaaatctatccaatctcaatcagctttgaccatacaaaataagatttccatgaatcttttgtaatttacaaatttttccattcttttttctccctactttccatatctattcagtttatctcattttttctttcttttattccttcaatttaatacaacctttacctctaaactaagtaaaattgcttttcctttaacaaaaccacatcctctgtcttgtgtataaccttccttaccaaaaccacatcttagacgttctgtatacagaattgtttctcttggttatcacatattagaattttaactcttagtgaccgtaattcatagcaaaaacctaagaagcaagcaatttttaactgttagtcatgtagcagtaatttatgatgccatctttataatttttagaaatatagggtttctaatggaacaatttttcaatggaacaggacatttttcctaacagatctcagtatcttttgtttctctaaaataagaagtcagaagccatatttagtagttactgtcttagcatcatctcttatttggaaatgatctagatattcaatgaatatttgtcattaatttagcttagtaaaaccctaagggcataattaccaaaagatttgagaaacctttttaagtaggcatattataaaacataattattattaaaagttcatttataaagttgattctatttatatgtatttaatttattcatttttagtgattgttgggaaaatttcgtgagacagacaaatccaaccatcatctcaagttaaattttctattaaccattttttattattgtacgttaggcaagtatcatagaagtaagaaccttaaagttagatacatacatattttgctggtaactcagaaaacatagtttttatttatttatttttattttttatttttattttttttgagatggggtctcactctgtcgcccaggctggagtgcagtggcgcgatctcggctcactgcaagctccgccgcccaggttcatgccattcccctgcctcagcctcccgagtacctgggactacaggcgcccgccaccacacccggctaattttttgtatttttagtagagatggggtttcaccgtgttagccaggatggtctcgatctcctgacctcgtgatccgcctgccttggcctcccaaagtgctgggattacaggcatgagccactgccccgggccgccgacatagtttttattaaaaccatcccggctaaaacggtgaaaccccgtctctactaaaaatacaaacaattagctgggcatggtggcgggcgcctgtagtcccagctacttgggaggctgaggcaggagaatggcgtgaacccgggaggcggagcttgcagtgagccgagatcccgccactgcactccagcctgggcgacagagcgagactccatctcaaaaaaaaaaaaaaaaaaaaaaaaaaaaaaaaaaaaaaaacaattttaaactagttttatttgccaaaagatttactgatttactcaggtcatgtgaacttggaaaatctttgggcttactttctttatttttttctttttcagacggagtctcactctgtcgccaggctggagagcagtggcgcgatctcggctcactgcaatctctgcctcccagtttcaagcgattctcctgcctcagcctccaagtagctgggattgcaggcacgcaccaccacatccacctaattttttcatacttttagtagagatggggtttcaccatgttggccagatggtctcgatctcctgaccttgtgatctgcccccgctcagcctcccaaagtgctgggattacaggcatgagccactgcacctggcctcggtttaccttctaatttgtgagtgctcgtttgtctttaattttgtatcatgtagataatatacaaaaacatgtatagacataacatatatgtagacacaacatatagcacacatgtacacatgtatgtatcgacaagttacagagatcaaggagctctatgtaaaagagaatagagctttagacctgagaggagcctgtttacccacaatgcttggggctccatgaggataaacagaggttcactcatgtgataccaaaggtggcaagaggaaggagggacagacagcggtacatcaaagaacaggacttagaggagccagtcaaggagatcttgttttccataaagcaattaagttttacattatccttggcaaaaatcatgtcaacaagaagaaagagggattgtgtataattaggagcagtttgagaagagaggaaatcagagagaacagaggcatcaaaaaatatatatatacgtgtgtgtgtgtatgtgtgtgcatacatatgtagccaaatatcagcttttaatcaagtcagcttttgactatagagctctttaaaaacttttaatcaggttttagccaggcagatagtaaacattcggccagatgcagtggctcacccctgtaatcccagtattttgggagaccgaggcaggaagatcacttgaggccagaatcctgggcaacatggcaagacctcttctctagtctcaaaaaaatgtttttaaacagatagcaaacctatctgttccttggctttccctttctgaaattcacatcaaggagtttgctttgggaggtgggtcatatttgtttattagaggtctagggtaatcattatttaaagctatttgtcttttgtaaatcttgcagcaaagttcagcagacagttggagcatttaaagggttttctgggggagtttcctaaaaaaaaaataattgtacctttcaaatctcttatgagattgcagccaggacaaataggaagtaggtctccattcgatttgtctggttctaaatcctgccttttccaattgtgtgcacaaatacattaatttaggaatttcaagaccctcatttgggccattgcactttggggtatctcacgccgctgggtccatttacctaggtatttgcaggatggcgctccataggtattagacataaatccagctggtgtttcggggccggggcgggggggctgtcctttaaggcaaagctcagtttcaatgagcagtttcctataattttatttatttatttatttgagatggagtcttgctctgtcacccagcctggggtgcagtggcgcaatctcagctccctgcaacctccgcctcctgggttcaagcaactctcttgcctcggtctcccaagtagctgggattacaggcatgagccaccacgcccagctactttttgtgtttttagtggaaacggggtttcatgatgttggccaggcaggttttgaactcctgacctcaagtaatctgcccacctcggcctcccaaagtgctgggattacaagcgtgagccaccatgcccagctaatgtttgtgtttttagtagaggcggggtttcacgatgttggctaggctggtttcaaatgcctgacctcaagtgatccacctgtctcagcctcccaaagtgctgggattacaggcgtgagccacacacccagcctcctataattttagaatttccttctcaaaagtgaccaaggccaggacagtatattgcgtcgaggtgtgccgctttgtgggtgtcactcttccaggtgtcaccagtgaatcgtgaggcatgttcttatgtgtcttggaatctcttatcaccttgtggcagcagagtgcttcaggtatcagagtgaccagtcccttattcatacctttccagctgagcaagagtccttactggtcttcttcctaatgggaggccctttaagactccaacacgtcatgcatggaaaaacatccccatacctctgcaaagtctctggttgcctaaagaatccagtgggtcaaagggggcaattttctcttctctttgaggcaagatgacttaccctcatgcagcttagtcagaagcagctgcaatttaaaaagcatgctgtctaatttcagcccagaagtgcagccaccagtgccagaatgccagtactgtgacccgggcctcctgctgtgaagcagcggtggagaaggcagttttctttttttccccctgaaactcgaatcccttgctcatagacaaagatggaaaccttcattctagaaaaagagagatagaaccactcaaataaagtctagacctcatctgacaagagagggggtccagattcaggagcactcacccttttgcccccagtgaacctgtggaattggaggaacacagtgggtttgttctggtactgagcatcgagtccaggggcacccagtgtctgagtgggtagctctgaaccctgctcacagggccaaaaaacattgacataaccgaagaaactgaggcaaaattaacatagacagagtttatttgggccagggttgagagaattgcagccctggaaacactttaagttaccttgggaagagcactggagaacaagggagaggcttgtggtttttgttttttttttagagacagaattttactctgtcacccaggctagagtgcagtggcaccatcattgctcactgcagcctcaaactcctgggctcaagtgatcctcccacctcagcctcccaagtagctgggactgcaagtgcatgccaccgtgcctggctaatttttttctttatcgtagagatggggtcttgctgtgttccccaggctgatctcgaactcctggacttctgcctcagcctcccgaagtgccaggattacaggtgtgaggcaccatgcatggcctgcttgagcttttaaagaaaaaaaggacaaatgagaagaggggtgattataaaaggggttttgcaggaaatatcattggtttacagaaataacattgattaataattgcccatccattgtggaactagagggtgtgagttacggtgtctgtggttggtggcagtctagagtccacgtagcacgtggcttcaggcgatgagtacttctcttaagtgagaagtgggatatgactgctgtcctattccagtgcctctctgggcctgatcatttaaaggggctcaccatataacttttctttctcatacccacccttttcgaagggacattggaattggccactgtgctggatctaggtcgtaggcagcaaagtaatctagcacatgcctcctcttagatcacttccattcagatagggtgtggttacataggtgcgggactagtgggctatttttatcagcaggctatataactgcattcactgttagccccagtttcaccagatggtgtgaaagcacaacccactcccatccggcccttgggaattctgacagaaggtttaaaaacatagttacggtttcttaggaattatccctgcttccagcacttggtgctggtagatagagccttggtgctaggaccattacatcaggtaggagaaagaaagagagaaataaaatttataatcactgtaccagcgtatttctcccttggctagaactgcagagtcacaccaacatcttccccagattctgcatgtaatgttgctgcttggggagtttgagaagatgctgacagtttgaagcagggatcagaaggtggcccaccaggagtgagctggagatgcccggtctctcttggtttaacatagaggacggggaatcaaaggcttagggaaattgtaatgcttgagtggatttgtaacttaaaacccactcacccacactggagggtccagagaacacacctttcaccaatactttgagaagcagatttatgagggggccccggcatccctggttgctcctctctgcaagctggaccttacggtgggaaccgcagtcactcagttggaaaacttacatgcagtgggaacaattagatcctggagaggcagggaccaagtgtcagcactcagctgctgaaggcaagatgtctgtcatggacacagaagcaaatccacaattagaataatctgactgttgcgccccagtcagaataagggcttatgggggcctggtgatgaatggagttttagctcaggtccgactctcagtgggttgagttggtccctggacccctcctgtggtcatttcccccgttccagctgcacaattggaataaatgtactcagcagctggcggaaaatccccacgttggttccctaagctgtggagtaagggccattatggtgggaaaggctaaatggaagccatagagctgcctctacctaggaaaattgtaaatcaaaacagcagcacatccctggagagattgtagagattagtgccaccatcagagacttgaaagctgcaggggtggagagccttaccacacccccacttcactctcctgtttggcctatgcagaagacggctgcatcctggagaatggcaggggattatcgtaagcttcaccaggtggtgaccccagttgcagctgctgtaccatgcggtttcattgcttgagcaggtgaacgcatctcctggacctgccatgcagctactcgtggcgagtgtcctttctccatccctgtccgtaagacccaccagaagcagtttgctttcagttggcaaggccagtgccacacccttgctgcctgcctcagggacatatcagtccttcagccctgggttacagtttccttcacagggatcttttctttttaaaaaattaatgaaatttttattaatttgttacctttttattttaatagctttgggggtacccgtggttttagtggcatggatgaactgtataacagggatgaactgtatagtggcagagtctgagatcttagtgtacccgtcacccgagtactgtacagtgcacccagtacatagattttacccctcacccctcccactctcccccttctaggtctccagtttccattataccactctgtatgccttgcatacccatagcttagcttccacttacaagtgagaacatagagtgttttattttccattagtgagttatttcacttagaataatggcctccaactccatccaagtctacaaaagacattattttgctcttgtttacgggtaaagtagtattccttcatggggatcttgatcacccttcccttctgcaagctatcacactggtccacgacactgatggcattttactaattggacctagtgagcatgaagcagctactctgtacttattggtaagacagtgtggagtgaggcaattctcctaataaacaccctctcatatatatccacatgcataggtatagtcatgcattgcttaacaaggggtagtttttgagaagtgtgttgttaggtgatttcattgtgtgagcatcatagagtgtgcttacacaaacctcgatgttacagcttactgcatacacacctaggttatgtggcatggccgagtgctcctaggctacacgcctgtacagcatgttactttagtgaatgctgtggcaactgtagcaaaacagtaagtatttatgcatctgaacgtagaaaagggatggtaaagtcatggcttacacctgtaatcccagcactttgggaggccgaggcgggtggatcacgaggtcaggagatcaagaccatcctggccaacacggtgaaacaccgtctctactaaatatacaaaaaattagccgggcgtggtggcaggtgcctgtagtcctagccactctgggggctgaggcaggagaatggcgtgaacccgggaggcagagcttgcagtgagcggacattgcgccactgcaccccagcctgggtgacagggcgagactctgtctcaaaaaaaaaaaaaaggccaggcatggtggctcacgcctgtaatcccagcactttaggagtctgaggcgggcagatcacgaggtcaggagttcaggaccagcctggccaagatggtgaaaccccatctctactaaaaatacaaaaattagccaggcgtggtggcatgctcctgtaatcccagctactcgggaggctgaggcaggagaattgcttgaacccgggaggcggaggttacagtgagccgagatcaagccattgcactccagcctgggcagcagagcgagactccgtctggaaaaaaaaaaaaaaaaagataaaatctagtacacctgtttagggcacttaccatgaatagagcttgcaggactggaagtttcactgggtgagtcagtgcgtgagtggtgagtgaatgtaaggctaggacagtaatgtgtatgtctgtaggcttcataaacactgtacactagattatattaaatttatttttaaaagtttttggttcttcaataataaattaaccttagcttactgtaacttactttataaactttttaattttttaaaactttctcactttgttgtaataacacttagcttaaaacacacatatacacctgtacaaaaatattttctttatatccttattctgtaagcttttttctgttgaaaaaatatttcttttgctttttaaacttttttgttaaaaacgaagacacaaacgcagacattagcctaggcctacgcagggtcaggagatcagtatcactgtctcccacctccacaccgtgtcccactggaaggtcctctggggctgtcacacgcatggagctgtcatctagggtgacagtgccttctggatacccctgaaggacctgcgtgaggcccttgagaaggtgtggttcttttcagaaaaatgtccatggtggttcgcttggcttcttttttcgtcatggatttgtgtgagtaatggcgttgtgctgagacattcccatggctgtgctgtcaccaggcaataggactatttcagtgtgtttatcttctgggaccacacttgtatatgtgggccactgctgactaaacatcattatacagctcatgactgtgtgtatgtctctctcttttttttttgagatgggtcttgctctgtcgcccatgctggagtgcagtggcgggatctcggctcactgcaagctccgcctcccgggttcataccattctcctgcttcagcctctctagtacctgggactacaggtgcccgccactgcgtccagctaattttttatatttttagtagagatggggtttcactatgttagccaggatggtcttgatctcctgacctcatgatccgcccacctcggcctcccaaagtgctgggattacaggcgtgagccaccacgtccagcctgtgtgtgtgtgtctctctcattagttctgtctctctggagaaccctgactctcatgatggatgtccctcacggggtccttttccggaagacaccacctatgttctttcctgtctatgcttggaacttgggtgcaaacctaggccggatctgggggactccctctgtgctccctggcccttcctgggatctcctgatttttgttctgtggctttgggttccttacatcagagtccagcacagtcagttagaaatgcgtgttgccttgcaagcggatactagtgcctgtacacctacagcatggatctgtgaaagtaacaggaatagtcacaaccactatttcatccagcgctcgccagggcccagggtgtgaccttcatgcagtaatataactcatttcatcttcacggctaccctgcgcagtggagactctctttgtccctggtttataggtgaggaaaccaaggcccagagggtagctcactccactgaggttgcacagccaggaggtggcagctttgtcccagagtcaggccataagcagggcaggcgcagcgggtccgagtttctcggcacagcactcacccttagctcaggcagtgcaccttggtggtctctctgacttattatacagagaatgctgggtatgacttgccaaactcattcaccagaaactaacccactagggtaaaaacccttatgtcaggcttcaggctgtcactagcagcggcatttcctgccctggaaacctgacttcccccagctgcctgcatgcctcaggcaggcacggctcccttctgggctgctgctcattgtctgcatgttggagatattcagaatgccctgttacaccttgtactgtgggtccactccatgtgggatcttgatgctgctctataatccctcacccttagttttaaaacccaagcagttctgaagaacagttgttctggtaagtttgggcagctcgttcagtggcaaaacctgacctgaactactaagaagctgctgatggtcttgattactctccagtggcatgtctggaggttttgctgcagaaatggccgtgtatgtgcttgtgattactaggtactgccttggacctgctgggggtgtcctatgatagagcatgtacacaaaatcatgtgggtttttttgtattgttttgttttggtttttttttgagacagaatctcactgtgttacccaggctggagtgtgatggcacaatcatgactcactgcagccttacctgggctcaagcaatcctcccacctcagccccccaaagtagctgggactacaggcatgcaccaccatacctggctagctttttgttgttgttgttatttttttctagagatagggactcactatgttgtccaggctggtcttgaactcctgagctcaagtgatcctcccacctcagcctcccacagtggtgggattataggtgtgagccaccacacccggccatctaccaaatcaccttactaaaatccaaaaaattcccaatccccaaatacacgcagcccccagggcttcttcggggattgtgaacctgtgttaccatttcaccagctccagacatcattacccatgagtactcgctgacgaagataatgcttttagaaacaacttgtttacttagcactgtggattcacctgcagttgtaagaagtaatgcagaaatcccagttttccctaaaggtatatctggcataactacataaatatcacagtcagaatactgaccttgatacaatccaactgccactttaaaaaaaaagttcagtgtgaagttctgacccggtgggccttcaggagctgagtcccttctggtctggactgaatgaccttcctcaggagcaggagcccagcagggcatcttcactgtcccagctagaccttgcgtgtcgcagcagctacagtagcagcaggccttgggatgagcacttgcctgctgctgcctggcattaagttctcacgacaatcctccagggggtgctggcaccacccctactttctagaaactgagggaggcttgagatgtgaggccgcctgtcctggcaggcctggattcagacccaggaggcctagtcccagagcccaggctcataaccactgccccacgctgcctccctggagggcatgcagtgtgccccagggacgagaggcccaggcagggaggggaggtggtggaaggggagcccatcccagcgtgcatagcggaaatcaggagcctgggctttggcgcagtttcgcctgggagagaagggaatcctggcttcctgggtgggtgacttcacctccccgggccttggttttcttgtctgtcagatgaggattgtgaaaacactgccatgtagaggtgcatggaggataaatgagcaagtgaattgcttacacaatattaggcacatagtaagtgctctagaagtgagctgtgtattattattgttgccgctgccactgttggtattcccactccctttctcctccctgcgctgtcattgtttgccttcatctgccttcccagcccgcccacccctggagaacaggagactggcggggaggaaatgctcagtcactcattcatttctttggagaaaggggggaagggaaattcattgactgctgcacgcacagctatggctgagcctcagccctgccctcacagggccaccttccagcggggtggacagaccggttccgaaccagcagggctcacggctggaacaagggagcccaggggcctttgggagcccagagggggtgcctgacccagcctctggggcttcctagaggagggatcagtggggctgagacctggaggaggagctggaggtgcaaatgaggtgctctgggcagaggcagcctgcataaaggcctggagccagcatgccggggacatgagtggtctggctgggaggtatagaggggtgggaggagccgcatgggccaggccacatgctggtttggatgccagccgggtgtgggcacataaccactcctcattgggaaggatgccaggggctgcctggcactgtcttcctcccctgccttacacccacccacagcccaggtggagctgcctggcagggtgccctaggcctgcccagacagggaggaggccgtggcctgctgggcctgggctcttctcaccccgcttggcgcacacacctgtttccagcatggatgagcctcaccccctgcttctgtcacaccaacctgcaggggtcagtgggtgtctctgtggaggtttctgagtcacgctgccaggctttccaccagaggccacccctgctccttgagggccggccctgggacctcccagtctgtcctctggcacaggagatacgggggtctgctcctggggaggctaaggatggtgggcaggtcagacgggggtctacgtgactaaacaggtgaagtcacttgcccaaagtcacatggcaagtaagtagcagagccaggatctgaatccagcccccaaatccagtctgcttttcaggttagaagatcagagtttgcaggaatcggggtaaataaggttgcggggatagggctcctttcactgggaacttgctatgtcccaaagctgaacgccccatgcctattgtgtatgatctggtcatcagcgcagcagccccagaagggggaccgtgaagagcagtgggcgcccacgtggagtttcctttcacctggcaccactgtgcagggttcacaagcattcacccatgcagctctcccagtggccctcttgagggagatatatatggttctcagtcccacctcagagagaaactgagccacagagaggcagactcacctgcctgaggtcacccagctcatgacttgcagagctgggatttgaacccggtctcagggatctgtgaccctcagttcctctcttcagtggacaaaacagggaaatcttttgtcctgggcctccccagagtgtgagggagggaagtaacagcactcggtgctgctgcccacctgcccctgctgcatgccgggccccctgtgttacttattccttcccacagccctggcaggggagccctgtgtcacctccctgttagagattaggtaacctgggcttggggagtccatgtcgtccagcaagtcattggccctttgtgtgagtctgggctgttctgtgaccgtagacccagccgggcccttcctctcatgctccgccaccttggtagtcacgatagtagcatcaggacctgtgcttgggatgctgctcaccccacagggattctcacagggcacctgaagctgagcccgcagtcctcagacaggcagttgtttgattttagcgcgctcatagctaagattgatgaagtgcacccatgcgggcagctttgctgtgcccagttttggggtgcagaaaccaaggctcggcagttaaatacgtctagggttgcaccatcagcacctggcgcccaggcggtctgacttccactttcatggaacccagggctgggcagcctgggggcaaccgctgtgcccccacctcagcctcagtgtgcacgccccttccctcccacccaggtggtcaaggtgaagccccatgacaaggatgccaaaatgaaataccaggagtgcaacaagatcgtgaagcagaaggcctttgagcgggccatcgcgggcgacgagcacaagcgctccgtggtggactcgctggacatcgagagcatgagtgagtcaggcctggatgctccacgctccagcccagaacattccacacgggccttctccattccctgggggtggggttgggctcaggggtggccccttgttctgtccccaggctggtgtctgtcgctcctctgcctgtgttccagggcgctccatccacagcccaaagctgggcctcacgcttcccagtgagcgagattggagagccatggtccccctgccatttcacgggcccttcctccgggtagtagcacagtccccacaggctgtgtctgattcacctctaggtgctgagaagatccaagggattgttgtggatcatcccacagatgattattgagcatctcctatgtgcccggcactgtcctaggcactaggggtacagctatgaacaaaacccttcctgtccacatggagccgatattctaggagggagataagatgatgaataagtcatgaaatgaatagtgctaagtgccataaaactgaatagagtaaaggggggtgggtgaaggaagacagggaggtcaggaagaggcctctgggccagacctgacccaggaggggactcttcactcactctgtcccgctctcgacctgtgtgtccacacccaagttttccccatccctgggagcgagacccccttctccctcatagtggctgtggtcactgactctcgtgtcccgttgttcacaccctagccattgaggatgagtacagcggacccaagcttgaagacggcaaagtgacaatcagtttcatgaaggagctcatgcagtggtacaaggaccagaagaaactgcaccggaaatgtgcctaccaggtaatgcatctgtcaggtactgggcacccgggaaccctgggatggcatcacagcactgccagccgcgggcactgagcaaaacgacaggagaagggcggccatgacagccaacaccaaacaggagtcgtgtgccggacactgtgccgagggcttaccacatgatctcatctcgtcccacagcagtttggggaggtggcaggcagtgccatttgacagatgcagggacaaagggccagagaggtcaggtgactggcccagggtgaaaggtgaggaagcagtagagtctgttgctttgagttctcatcccaggctcttgggcgtctgtggctgctggttgttgcaggttgtttgggacctgctggttgctcctagtcctgagaccaccccctccccgacctaggagggcagctggccacagggtgttaactggttgagtgagactcaggctctggtatcccatctggacaaggccccctgccctgacctctcagggctacagggaccttaccatagttttggggaactgctgagatccaccacctcctgggttggttatgaggatgcgggacttcttgtgagtcaggttgacaggcaggtgactcttacaggagtgtgcaggcaatatgggaagccgccatttgataggtcctagagagccaagtggcctgggttcaaatctctaccttcccacatactagctgtgtgcctgtgggcagatggcttcacctctctgtgccttgatttcctcctctgtgcagtggagataatcatactgtctccaccaagggctgttgtaaggagtaactgcgtgtaatccacatcagtgcttcgaatagtgcctagcacatggttagtgctctgtatgggttagctgttgatcatgttgttaaaggtgagacaggaggaggaatgtccacattcctggttgtttttaattgaagtataattaatgcacaataaaatacacaaatctgaagtgtcctgttagatgagtttttagagttttatgtgcccactgcccaaacaagttacagaacatttccatcaaccagaaagctccctttgacccctttctagtcagccctcactcccatcccaggggcaaccactgatctgatttttcaccactgtaaattaattctgcctggttttgaatttcatttcaatgtcatatgggcttacagcgtttagtgtctcttctttcatgtggcacaatgtgtgtgggattcatacatggatgttgtgtatatcggtagctcaagtcctccattgtctgaacagcccatgacttgtttatgcagtcttcttttgagagacatttgggttatttctactttgtagcttttataagtataagctgctatgaacttcttggacaagtctttttgtgaacatgttttcattgttcatgttgaatttctctattgattgtcttttgtttcattgatttttcattcattattctctatgcatgcttgaggtttaatttgctttcttctggcttctgaagatggacattaatgctgttaattttacatcttttcttccacacaaagcatttaaaactaaatttccttccaggcagtaagttagctgcgtcccgtgaattttaatacgtcgtattttcattatcattgagttagaattgttttctaattttctttatggtttctgattttatccatagattattgagaagggtattgtttaactcccaaatatttggggacttctagatgttactgttactgatttctaatttggtcagacaacacactctggatgattccattggggctatttttagatctgtcttggcaaacatgcagtatgtactggaaaatagtgtgtattttgcagtcgttagtcatagggctctataaatgtcaattagttcaagatggttgagactgctgttaaaaatcttttatagcctattttttctaattgctcaatcatttattgagggggctgttaaaagctccgactatacttgtagatttgcctatttctccctataattctcagttttttgcttcctgtattttgaaatttttattaggcacacatttaggattgttatgctttcttgatgaattgactcattataatgaagtgacttcagtactttttggcttgaaatccctgttttctattaaaatagttaaaccagatttttacagttaatatttgcatgctataacttttctacccttttgtatttaacccattggtatctttatatttaaaatgtttttcttataaacagcatatacttgggtcttgcctttttatccagttggacaatctttacctttttttttttgaggtggaatttcgctcttgttgcccaggttggagtgcaatggtgtgatcttggctcactgcaacttctgcctcctggattcaagcaattctcctgcctcagcctccagagtagctaggattacaggcacacgccactatacccaactaatttttgtttcgttttgttttttgagacggagtctcattctgtcaccagggtagagtgcagtggcgcaatctcagctcactgcaacctctgtgtcccagattcaagtgattctcctgcctcagcctcccgagtagctgggactacaggtgtgcaccaccatgcccagctaacttctgtatttttagtagagatgggattgtaccatgttggccaggatggcctcgatctcttgacctcgtgatccacctgcctcagcctcccaaagtgctggaattacaggcatgagccaccatgcctggcctgatttttgtatttttaatagagacagtgtttcaccatgttggtcaagttggtctcaaactcctgacctcagataatccacccacctcggcctcctaaagtgctggaattacaggtgtcagccaccattcccagccaatctttaccttttaattggagtgtttagttcatttatgtttaactatcagcaatcatatgattgcatttcaatctactgtctagatgtctcttttctatatgtcccatttgtttttttcccccttgtttctccttctttgactttcttttgtgtgaatcaggaatcttttagcatttcatctgttttattgaattttttgttatacttttgaatgtgtgtggcgaggggtggagtgttacatggttgctctagagcagcccttctcagctgaggctctatagagagaattaagccctaactcccttaggcatccattatatccgcagtgaattaactcctctcctgtgaatctgtgtgctctccttgggagaactgagcagatatcactgaaaatattttttgtggggcttaatcatttcccggaaccctggatgaaaaaggctgctccaaagattacaatgtgtaactttaacttgtcctattctactttcaaataataatatgatacttaatggacaatataagaatcttatggcctggggcagtggctcatgcctgtaatcccagcagtttcggaggccgaggcaggtgaatcacttggggtcaggagttccagactagcctggtcaacatggcaaaaaccccatctctacaaccctgtctctactaaaaatacaaaaattagccaggcatggtggcacacacttctaatcccagctgctcgagaggctgaggcagaagaatcacttgaacccaggaggtggaggttgcagtgagccaaggtcgtgccactgcactccagcctgggcaacagagcgagactccatctcaaaagaaaaaaaaaaaaagaatcttacaatattgtgattgcttttattttctcccagcctttgtgctcttgtcatgcttatgcatctgctataaatacattgttgtcatttccttaaatagacactagtcttctaaagaaatacacgtatgaatacacagaaaatgtcttttatatttaccctttctcttactccttgtttcttcttccatatgtgagtttctatctggtatcatgccccttctgcctgagtacttttagcatttcttacagtgcacgtctgctgtagactaattctctcagctttggtctgcctgaaaatgtttttattttgtcttcatttttaggggtgtctttgctggatgtagagttctaggttgacattgtttctttcaaggctttaaatgtgtttttttcccattgccttttgacctccattgtttctgtgagaactcagcaatcattcatatctttgttctatatagtctgcttttttcttcactggttttaagatgttgcctttgggttttagtagtttgactatgatgggctttgatgtgctttttttgagtctgtgggttaatatctttcattagttttggaaagttcttagccattatttcttatatttcttcccatttctgctctcctctccgtctggaaagctaataacatgctctttgatactatttgatactattccttagatcttaatgacctgaatttttttaattcttttcacgatttttcctctatgtatttcagttcagataatttcagttgtccttatgttcactgattctttgtaactgctgtcaagcccaacaaatgaattatttatttcttacattgtattttttattggtagcattttcatttagttgtgttttttttaatagacttttcatctctgtgtctcatgtgttcatgcatgttgtccaccttttccaccaagtcctttcacacatttaccatggttatcttaacgtctctgtctgatagttccatcatctggttcatctctgagtctgctctgttaccagttcttcatgtgttttacaattttattgtatgccagctattttgtataaaagaacattagagactgaggtaaataaagtttttcctcagaaaatggcacacttaggctgggcaccatggctcaggcctgtaatcctagcactttgggaggccaaggtgggcagatcgcttgagcccagtagttcaagaccagcctgggcaacttgtagaaaccccacctctacaaaaaaaatacaaaaattagccaggcatggtggttggcacctgtagtcctagctacttgggaggctgagtggggaggatcacctgaacctgggaggttgaggctgcagtgaactgtgttcgagccactgcactccagcctgggtgacagagtgagaccctgtcttaaaacaaataaacaaataagaaaatggcacacatttctcctgttgagccacaagagggaggggctgtgtgaacctcatctgtagtttaggggcagcttttattggagtttctttaccaccggctttaaatgtgttcagagtagaattaggactttcccttcagcagagcttgggatcttagccctggcagaattccagggatgtctttatgttttaaagtcgccagcttttggaactgtgggaggcctctggtattcagccctgccgccagactgtggggccactggggtgctctccgctctccagtctcgcccccacttctgtacctcaggaggtttctctgcacctcactccctcgcgcccaaccttccatgaagcccgtgtgagggagttggcagggggcagaggcgggctgtgctggggctccctggagtcctcatctgtcacgccagtccccacacggtcatgaacttccactcatttcccctcacgcagggcatcccgccctgctgcctcgcaccagggtgaaagctgtgggctccttccccaaggaagggctcgtcctgtctgcattttgattaatttaggtccctttgcattgccagctctcagatggctttacctttgattttgttgcttgtttggcttgttttcatctttagggcgagacagtcttttgtaacttttctaccttctgactagaagtggatgccgcctgcattttcttaacacctttttccccagcttattttggaaatcgtcagacctacagagagctgaaagaacagtacagttaacatctgtccacccttcacacagattcaccacttgtgaacattttaatgcattaactttatgtgtctgtctacttatttatgcatttgtatgtgtatacttttttcttttttttcccctaacccatttgaaagtaagttgcagccatcataacctggatctcccaaaaacaaagacgtcctcttgtgtgaccacagttgaattgtcctaccttagaaattcatcattgatgtgataatactgactaaggtagacagtccacaggccatccggaaaatctggaaacattgacaaatatgcatgtcattgtcaaggtcatatccaatctgtgaaaaataaatcatctgcatttctagacatctattagtattttaattctccccagctctccccaaaacatcctttttagctgcttttaaaaaattcagcgtccgttgaaagcaccagtgttgcctatgacctgcctttttacctctttttacctagaaagtctcacttcttttttgggagactcttttatgacagtgacattgcgctgtgtccaggccagttcttttataaaatgttctacgatctggattcatgcatgtatttccacttgatgctgagtattttaagataattcaagaatcaggttttcgtacaaaacaatcgcaatgcttcggcactgcacaggccacagaagcctgcggctgcctccggccccgcctgctcccgctcccccaggcctgccctgccctttttcttctctccctgcttctccctcgccctcagcccagcagcgtctcatgggcagtccaggctttcggggccaggttgggcagcagcccctgcagccggtcccactgagtctgccctgccttccagattctggtacaggtcaaagaggtcctctccaagctgagcacgctcgtggaaaccacactcaaagaggtgcgcgttgtggggcagtgcggggagggccagcgggggtgggctctctggctggggaggggccacagagctcaggaactcacggatccacctccctctctccctcacaccccacccctgtgcctttcctcctgaatatcccatttctctcctggcctcttggtcttcgtttgtgttccctgcttgtgtctcttgcatgattcttcttggtctactgtgaactcttacccttcccctcacctctgccccctccccacgtctctctctcggcccgtccctctccggtggcctcttttctttcagacagagaagattacagtatgtggggacacccatggccagttctatgacctcctcaacatattcgagctcaacggtttaccctcggagaccaacccctatgtatccttctcagcagagccaccctctccccacctccacccccagccgcagcctcaggtctgcacagagtgggaggagcccttgccaggaaaagacgtgaccttggaaaggagaggcctggccatgctggggcaccaaggtgtgggtggagctgcaggctggccatgcaccccaggctccaggctcggacaggcctgggccagcacccacctgctgtgtgacctaagctggtagctcagtctctctgggtcttggcttgtcttcgtctgcctcaggatcacatttgaatggcacctggcactggccacacttgggttccatcctggctttgccacttcccagctgtgtgaccgaagcaggttacttcactgcttggtgtcacagtttccccatttgcaaagagggataataatatgtgcaaccttgttactcagcagttactgagaggacaggttaagaacagggcctggcccacacctgatgctatctaagtatttccccgtgttatggtatctgctcgatgaacggccacttgtagggccactaggcctatgcattgttgagtgggagggcccgtgtcccatctcccccatggctccaggcctctctgaggagagctgaaggaggtggactgactagtccccgcacctccccgccactggctttccgggagacaggaggcagggtcctcagtgccatactactgaggctcagcggccaagctctggctggagccacggtgaggaaaggattagaaacccagatcccttgagccctgccaagtcctcactccctgggaggtgctgacaggaggcttgaggccaggcaggagcagcccatctggcccatcttctgccaccacccccaaccccaccgcaccgcacccttcccctccacgcttgccatgttttcctcagcaggacagatatttaatggtgactttgtggaccgaggctccttctctgtagaagtgatcctcacccttttcggcttcaagctcctgtacccagatcactttcacctccttcgaggtgagctgggaagtgacaaggtttgggttcattgtggggtcctgagtggggcactcactctgcaaggataatagttgcagctgtatttattttgtggactcggagatcatgcacagggcgaccttttaagattgagtatgtagtgcactgcacaaaagcatcacaccaaaggacgcgtttacatcatagatagtgtagaaatggatgtttactctgaccatttttcagcagatggcaaacaagggtgtgaggatgggccccttattctaatttgcacaagggcatgaaacaggctcctgggtggccctaaatctggcactaaagctgagtgactgagtgaacagaccagggctcgagggtgggagtaaggagactgttgacgaggcagttgtgccccctcagattcaggcttggtgtcagatttgggttctcttgattgaagtagagcccggagctgagtgtgctggttcacacctgtaatcccagcactttggaaggcccaggtaggaggatcacttcagcccaggagtttgagaccagcctgggcaacacagtgagactttgtctccagtaaacattttttaaaaaggccaggcgcagtggctcatgcctgtaatcccagcattttgggaggccaaggcaggtggatcatctgaggtcaagagttcgaaaccagcctgtccaatgtggtgaaaccccgtctctactaaaaatacaaaaattagccgggcatggtggtacacgcctgtaatcccagctgcctgggaggctgaggcaggagaatcgcttgaacccaggaggcacatgttgcaatgagccgagattgcgccactgcactccagcctagtcgatagagtgagactcagtctaaaaaaaaaaaaaaaagccaggcatggtggcaccgtgcacccgtagtcccagcttcttgggtggccaaagtggaaggattgcttgagcccaggagtgtaaggctgcagtgagccatgatcacaccgctgcactccagcgtgggcaacagagcaagaccctgtctctttgaaaaaaaaaaaaaaagtaagaaacttggaagtagagcccagagtatttgctggaggaacagacacaggtgtgagacaaagagggaacgaaaggggccctctagggttttggccggagtatctggagggctatggctgccagtgacgaagacgggaacatgtagagcagggtgtggccaggagctgaggagctcccctttggatgtggctgagactcaggagacatgggatgtgggtggggttccaaggggtgttgaaaatgtaggtttcttggtgtccagatgagattagacaagaggagctcactgggatgtgagggccacacaggggaggccctgcccatggcggggccggggtgagttgggaggtgagtgataggctggggcgaagcctgcatgcccgtgtccctgggctcacagggttcacgcagcagtgtccagcacagggtcaaagctcaggaagcccgactgtgggcctcgttgcaggaggcaacaagtgctcaggccgagaagtcagacaagcagagtctgagcagatgcgagactgggcagccttctccttgcccccaagctctggaagggaagaaggaggccgggtgcttgtgtctgagacagaaggatggagctcagggtggggtgggctggggcacatgttctgtagatgggcctactttttggttttgagacggtcttgctttgctctgttgcccaggctggagtgcagtagcatgagcatagctcactgcagcctctgcttcgtgggctcaagtgatcctctggcctcagcctcccaagtagctggcactataggcacgcaccaccatgcccagctaatttttaaaattgttttatagagaggtctcagtatattgcccaggctggtctcaaattgctgggctcaagcagttctgccttggcttcccaaagtgctggaattataggcgtgagccatggtgcttagccatggacctactttttgtcaagattccccccttggtacctccagtctggaaggcaccgcagtggcaagtgcgaggcccatgggggcaagggacgcatgcacagttctgggccttgagggtgccaggctggaggacactgatgtacctggaggctgagctttctcttctgtccccgtgttggccaggcaaccacgagacagacaacatgaaccagatctacggtttcgagggtgaggtgaaggccaagtacacagcccagatgtacgagctctttagcgaggtgttcgagtggctcccgttggcccagtgcatcaacggcaaagtgctggtgaggacggcgcgagccctgagtgtgggttccccacccagccacacctgggcagatgtgctggtgaaggaagttggggcctgtgggtgggtggcaccttccctcacagcggcatcccccatctccccagatcatgcacggaggcctgttcagtgaagacggtgtcaccctggatgacatccggaaaattgagcggaatcgacaacccccagattcaggtgagcagcgcggggccaggtgtctccagcagaaaggggcagcctgggctgagctctcccctgcaacccagccctgcctcggaggatgggctttgtgcccttggcaagaaacagcgggtctgagcctcagtttcctcacctgcgacttgggccagtgcacctccttcatggggctgtgatggcaagcacggtcgtgaccatggtgcggggtgaaggcacggtgaccgccgagcacacctgtccttatttatttgtgagttcagctgtggaaccctggaaggaggggaggtcttggggctcctgtgctagtgacgggcacacttcagagagttcacccacaggtgcacacgcacgtgcacactgtgagtgctgcagaggacatggattgggtgggctggtgctgggtgctcaggaaggcctctccagggaggcgaggtttgagctgacactgcgggaagcagaggcatctgccgtgcacagagcctggcgagcatattccaggcttgaggaggggtcctaaggcagggagaagttggcgagtgggcagggctgtgctttgagggctgacattggacatggggttcactgggcccaaatcctatggcgctttacaggccccagtgaggaactttgttcctagggcagtgcggagccaccaaaggctttgagtgggagaggggcctgatctgaatagtgacattgaaagctctatctggcttcggggccacaggggattgaatggggtctggagggcagatcagcagagagggtgggggtggctcagaatcacagtcacctgtcctgaatgtccatgtccatgctggatgtcccctgcccaacacccacccaggctgggctgtggggtcagcacctggccgggccaggaggtggcctgtgagtgaccacccccggggaggtggacgagtccctaatgtttccctcgctccccaccagggcccatgtgtgacctgctctggtcagatccacagccacaggtgagtctagggtggggtgcagggccggcgggtgtgggctgtggcagcaggtggaggcagacagtcaccctgaacccctgtctctcccttctgcccaccctcagaacgggcgctcgatcagcaagcggggcgtgagctgtcagtttgggcctgacgtcaccaaggccttcttggaagagaacaacctggactatatcatccgcagccacgaagtcaaggccgagggctacgaggtggctcacggaggccgctgtgtcaccgtcttctctgcccccaactactggtatgtctttgcctttccagcccagggcctctaccaagccacgggtttttgtcttggtttttgttttgcctttttatgatggaacatttcaaagacaggcaagagcagataaaagaacatgacgaacacccccgtatgtgtcacccacccatgcagcaccagtggggccagcctgtgagtgctgaccagctgccctgtgttacagcaagcccctggcacttcacctttctcccactgattgcccagcacttttcagaaggaaagggatctttttcttaaccacaatatcgtgtttacacttttgagtgctggctgggcatggtggctcacgcctataatcccagcactttgggaggccgaggtgggcggatcacctgaggtcaggagtttgagaccagcctggccaacatggtgaaaccccatctctactaaaaatacaaaaattagcagggcgtggtggcacacacccgtaatcccagctactcaggaggctgagtcaggagaattgttcgaacccgggaggtagaggttgcagtgagctgagattgcaccactgcactccagcctggggaagagtaagactccatctcaaaacacacgcacacgggcaagagtaagactccatctcaaaacacacacacacacacacacacacacacacacacacacacacacacacacacacacacacacacacacacacacacacacacacacacacacacacacagtgttgatcccttgcccccacccgaatcctgccaagttctctttctcctggtctctcctaagtgtcttttccagctgacttcttccagacaggacctaaacaaggaccacattttcagtctctttgcctgtgagttccctgtctctccccacccgcatcatttatttgttgaagaataggttgctgcctgctgtacgagtcacctgtgtcctggactaggctgactgcatccccgtggtgccgtgtgacatgttcctctgttccctgcatctctgggtgggcaaagctagaagcgtggtcagattcctagtggggtctggcgagcatccacctccatgagctatgccctgccccttcctgctcctgcttcctgcactcccaccctcttttccccatccccatcctcctgcccctcccattctttcccctggattcgtctttcccatctctgtctctctgtccatctgtgtctgttgtggctctgtccctccctctccctctgtcccttcttgcccagccattccttctcttaacccaccagccccacccagccctgaccacactgtccactctgctcctgtccctgcagcgaccagatggggaacaaagcctcctacatccacctccagggctctgacctacggcctcagttccaccagttcacagcagtggtgagtcacccctcagggcccctgccccttccatcccggcctggggacaaggaggctgagaccctggtaaggggcaggggtaggttctgccggtgggtgctcaggggctctgttctgacttctgtccatcccacctgccctggtcccacagcctcatcccaacgtcaagcccatggcctatgccaacacgctgctgcagctaggaatgatgtgaggtgacgggcggggcggcctgcatcccagggcccctccaatcccaccggacccaggccctgggctaggggcagagcaggccccgccccagggcaatgttggacccccttttactttgtaaagtttgtatttattcccctttaggtttgcagagggggtaggggcagagtcaggggctggccagagggtctgctccctggacagagaggaaggaggtggagcagctggggctgggggcacagcctgggcattctgtggggaggccgtcctcggggtggggtggggccgagtggctgccctgcccccctcatttgcatggctcctcccccactcaagcaatagggccccgccataggaagacccccagagagagggtcagcaggggggccccgcctgcgcctcccctcctatagccccatggtggggctaggctggggctcacccccctccccagctattttatgtctgtaattaaatatgttaaaataaagtcattatcggaagtcagcttgtctctggatggtggagccgaaggagctgcccgggttgggttacgcctgctcaggagatccggagggtggggaggccgcaaagtcccgctggccgggcccacccagctctgggctgaccgcccaagtggcctctgcctctgcccagcaccgtgggctcctggggagagttctgccccctgggtggggcgatgaggccagcactgagtggagcggagcggaagctgaggcatagcctcatcctttgctggctccagcaacaagcatgacagtgccgctccctgctccctgctcagggtaggcccagcagtggttcttgacatcacacgatgaggcgcgcatctcccgtcatccagggagaccagaggacccttgtctcactcccagttggctcttagtcacaggtaacgttggattccattcaggctgccctgccaggccttgaccctccagagagattgtgttttcaagtttgagctcctctggactcagctttctccagtggtatgtggcactgggggatggtctacagcaaatgactcctgcagggccgagtccgggagtgtttggccctttggagacctcccaggcagacatgaggcgtccgcggtcctgattgcgcgtaggcgctggggaggtgttctctaaggcccatcagccttacagtaagtgcaccgccttctggggtcaggtgcgccacggtccagaagccaagtacacatggcttcaggaaaacaggcacgaggcccaggttgccagtgccattcatttctcctgggaaagacaaaaacagccaccatgactgtcgggagggtgcttcagacctgatgggagtcagccaggcgggcagctgtgaggctctcagactcactgggtgtcggggttccctgccgctgcagttcaggaggtctcccaggacccggtatggtcattatcctcacagtgagggcctattatagcaagaatatggggatgagaatgagaggagggaagaggcaggcgcaagcgtcccactgccctctcccgtggagctgtgtggacagcgcttattttccccgcatggatgcgacagcgtgctggagtgtggccacctagggaagctcacccgggcctctgcatccaaggttttcttcaggggttggtcatggggactgctcaccccgcgtggctgaccgtagcctccagagagacccacggcccccaccctaaatcacatccttagcatagactgtccactgtggcccagggccccagataaagagacgctcctatgaggtaggacacaccgagggctctccggtgacctcccaggagccagccttttcttccgtcagggctgcagccatgctgcacagctgcataacaaacaccctaaccccccccaccccctcagcttcaacaacgaatgccttgctgtcttcctcagttctgtgattggctgggcttggccgtgcagggcgcacctgagggctgaggcatttgtggtcgggggcatttggggctggaggcatctgaagactcgcccggctggactccgtgggggctcactcccgtgacggcagttgctgtgggctgttagctgggctggcactggaacgcctgcgtgtggcttccatgtggcctgagcttctctcaacgtggcagcagggtccctcaagggagcattaaatgtttatatttaagtcaaccaactgcattccagctgtagctcttgcctcagcaatgtcctgccacacattcaattgtctctttcatttccttcaatctggaacatttcctcagccccgctttgtctttgacatggacgtttgtgatgatcacgttcctcccgctccccgtgtctgaagagtgctccctgactggctgccgtctcctccctgtcgggtctggctgggttctccagagggagtgctgcggaggggacacagcagaggccccatgctcgtgatgtatgttgcagatcattttcccccattctgtccttttttgttaaattgtggtaaaaagcacataacataaactgtaccaccttaaccatttgaaagtatatatcccagactgtcttttatctttagacttcacttgtggtttgttgccacagtacaagtttatttttatgaagccaaatgtatcagtatttctttaattgtgctggcgtgggagtcagtacttctccctacacccgggtttcagggaagttccctcgggtttcttctggtttttgtacagttttcttctttatgtcaagatctccagtctatttggagttccttcttgtatgtgatgtgaggaatggatctaattttatctttttccaagtggatattggaggaagtttttaaacgagaagagaaattcagaagatgctgcaagagatgggacctttacggcgatcaatgtctcagtaaagtcagaacaaagagactcaggcacacccaccacaagtaccaaaactttgagcagatcaacgccacagagctgggctcgggaaaacggaagggccatgggagggagggaaagcatttaatgggggaaggtctgggtaagccgataagttttggggaatcaagggggataaatacacgtgagtagggctctgaagttagaggcaatgaattgaccaaaaagaaacagtaacttccaaaagggagtgtgacggagagatgcccatagacgcaggtgatgaacatccagggctggccgggcacgggggctcacgcctgtgatcccagcacttggggaggccgagtcatgtggatcgcttgagcacaggagtctgctaaaataggggacaccactctagttacagtttggatcagggtcatcacgctggggacgtgccaggcacacggaggtgggggagatgctgggggctgggggcaggtgtggacactaagcaatggtgtcagaggctgctggggagtctcagggtctggcaggagcagatgtggactcccaggagtcatggacatgaattaggggtcctaagaagcctcgccactgacaaaggaagctgtgaagggaagaccagagaaccggggggagcgggggtcttaggtgctccccaccccatcgaccaggatggacccaggcatctgcccagctggatggaacagagactccaaggcaggaaggacccgagttctgtctccctgtcgttctcttggaccctttcacgctgtctttccccacccccatctgtcaatggccatgattagatcacagacccaagctctggccaccagggaaggcagaaagatgacctaacctccatagcaccgggtggggcccctgcctcccacctgtggggggtgtcagttgcttggcagccagagggacagaggccaccacccctcccctcccggccagcaccacagatggagaaactgggcccatggttccctctgcccacaccctcccatggctctcatctccgtggtccagcggatggggggaaacaggttgaggaatttggacactggaaaatgggtggaagcagttaaaacctgaggggaccaggaggggcagggtgggcacccatctcagatgagtcgaagagcagcagggtgattttccatgcccggccccttggctctgttctaagagtttacacgcattaacatttcattctaactcagtgagtcagacacttttcagatgcccattttacagataagcaagataagaagtacagagaggttaagttacatgctcagagtcacacagccagcaaatggcagaacgggacttgagcaccagctgactggctgcagagtctgtgccctgagccagtttgcagtagcattgagcactttatgtgtcaggcagtttacaggcactttgggtcctcgcaacagccccattttacagatgaggaaactgaggcacagaagcagcaatatacctgaggacacacaactaggaaggaggatagagcatattcggtgggagataataaaacctttgatgccaaatgctaaaataatatttggggaaaagcttttgaccccttttagcaaacaaaaattttatgatggcaagaatttatcctgctggttaatctgatttttccctttttagtacatgggtgttccctaaccttacccctgaagagaaaactcatgacttcccccagagctgtgcattctcaaagctttttttttttttttttttttttttttcctgagatggagtcttgctctgtcgcccaggttggagtgcagtggcgcaatctcgctcactgaagcctcccctccccctcctgggttcaagcctcgtaagtagctgggattacaggcgtgtgccaccacgcccagctaatttttgtatttttagtagagacggggtttccccatgttagtcaggctggtctcgaactcctgacctcaagtgatctgcccgcctcggctgcccaaagtgctgggattacaggtgtgagccactgcgcccggcctcaaagcatttttgttagcggtctttttaagatttctccaccgggtgtggtggctcacgcctgtaatctcagcattttgggaggccgcggcgggcagatcacgaggtcaggagtgtaacaccagcctggccaacatggtgaaaccccgtctccactaaaaatacaaaaaaattagccgggcatggtggcacgtgcctgtaatcccagctactcaggaggctgaggcaggagaattgcttgaaccaggacccaggaggcggaggttgcagtgagccgagatggcgccactgtattccagcctgggctacagagcgggactccgtctcaaaaaaaaaaaaaaaaaaaaaaaaaaaatttctcttgtaactgttctgtgattgtccactgtatggcgctagggggcgctgtaacaccacggtgttttatagtcattacaacactcttccagcagatggcggcaaagtgttggggaaagagggtgcctttttgccaatccccatatatttttctaattttctttgtatggtatgcaaacatttccaatgctcaaaatttggtctcagctaccattctaactatttgaggcttacgcttctctgtttcccctccaatctgggccgaagtcttcctgtcagtgaaacagggatgtttaaaggagtttttttggggcccctttcccagagctgtcctgatggcccatttggggcagtttctctctttttggagcgtggagctgctcttaaggccctgcctgctggattctcaaatagcatggtggacactcccctccagacctcctctgtgggcccagcctcccctctcttagccccttggagttcctgccccttttgggccccaaagtcctgtctctaactcaaagacagttagttatctgtgttaaaataaaataacatgggccgggcgtggtggctcacgcctgtaatcccagcactttgggaggccgaggtgggcggatgacctgaggtcaggagttcgagaccagcctggccaacatggtgagacccgatctctactaaaattgtcaaagaacaaattaaggtgtggtggcgggtgcctgtaatctcagttactcgggaggctgaagcaggagaattgcttgaacccgggaggtggaggttgcagtgatcggagatcgtgccagcctgggtgacagagcaagactccatctcaaaaaataaataattttttaaaaatggagaccaggactgagaattccccaaagcagacaaaagcagttaggccatgtaaacacaacttaatctagtttgacttctgaatgtgagtgaaacttagcttattccctgtaaataaatgctgctgagaatcataaacaaagctgaaatcgccttccaaaaggatgtaagacaatcacttttaaccgatcccttgtcatatggaagcccccaccatcatagtcggtcatcgtgaaggtgaagccacctcctggtttttgcttttttttttttttttttttttttgagatggagtctcgctctgtcgcccaggttggagtgcagtggtgcgatcttggctcactgcaagctccgcctcccgggttcacgccattctcctgcctcagcctcccgagtagctgggactacaggtgcccgccaccacgcctgactaatgttttgtatttttagtagagacaaggtttcactgtgttacccaggatggtctcgatctcctgacctcatgatccacccgccttggtctcccaaagtgctaggattacaggcgtgagccaccgcgcctggccttttttttttttttttttttttttttgagatggagtctcactcttgtcgcccaggctggagtgcagtggtgcaatctccattcactgcaacctctgcctcctgggttcaagcgattctcctgcctcagcctcctgagtagctgggactacaggcacccgccaccatgcctggctaattttgtgtatttttagtagagatggggtttcactatgttggctaggctagtctcgaactcctgacctcgtgatctgcctggctcggcctcccagagtgctgggattacaggcgtgagccactgtgcccggctggtttttgctttctaagccatcctacaccagcctgcctctgagttgcttaccgctcagattgaagtctcctggatgacaattcgtgctttttgcatgacaataaacttttttttcccccccctaattggagcctattttattctggacattttgggggaattagaagtgagattcaaagaagatcccaaggagccctgactgcagggagtaaccaggcatgggcacccacacagccagctgtgttcactactttcttgctaaccaaggggtttgggataagtctttttcggatctgagcttccttctcttcacctttgagctctccgtttgtcacacaaaaggggccgattctgtttgtttctatttgtctgtctgagtttgagctcgggtaagtcattctttcctgttcaataatggaggaggatctgtgtttccctgcatcctagaatggtaaccccctggctagacaccccatagcttatttggcagagtctcagaggaaacgaaggccagggtgcattcagaacatcccagtattctccatctagaactctacctgcttatatgtttaagaactatggccgggcgcggtggctcacacctgtaatcccagcattttgggaggccaaggcagggcggatcacttgaggtcaggagttcaagaccagcctggccaatatggcgaaaccccatctctactaagaatacaaaaattagccgggcatggtggcaggaacctgtaatcccagctattccagaggctgaggcaggagaatctcttgaacccaggaggtggagattgcagtaagccgagatcgtgcctctgcactgcactccagcctggcaatacaccgagactccatctcaaattcccagtgtcagccaggcacagtggctcatgcctgtaatcccagcactttgggatgccaaggcagggcggatcacttgaggtcaggagttcaagaccagcctggccaatatggcgaaaccccatctccactaaaaatacaaaaattagccgggcatggtggtgggagcctgtaatcccggctactccagaggctgaggcaggagaatctcttgaacccaggaggcggaggttgcagtgagctgagatcgcatcactgcattccagcctgggcaacagccaaaatactgtctcaaaaaaaaaaaaatagatagatagatagatagatagatagatagatagatacatacatacatacatacatacatacatacatagatttttatggatctctctgagatccctgacactgtatgggcctcttcttccacagatgtgggcaaaataaaaaatgctgaacctatgaaaattcagattaatctttcaaaaccactgttgaagttgtctcagtacccgctttacaaaaagccatacatgtgcaaactcctacaacagaagatttaatgaaacgggctatttcttgtaatgttcctatcctgttttaaaaaatgtacagatgaggatggatatttgtacaagatctcgatctccatgggatctttactacacccataaataaaacatttaaaaatgtcccgtatacatatgtaacaaacctgcacgttgtgcacatgtaccctaaaacttaaagtataatttaaaaaaagtcccatagtgcccaaccccaacaccctattgatgaaggtgccaaatgattccaaatcgaatggttcacaggagtggacatatgctgtctgtggttttttttttttgttttttttttttccccagacagagtctcactctgtcgcccaggctggagtgcagtggcgggatctcggctcactgcaacctccgcctcccgggttcaagcaattctcctgcctcaccctcccgagtagctgggattacaggcgtgcgccaccgcgcctggccccaacctgcattttcattggttgcagggataaaaggcaagtcccaccagaaaatcaatgccaaccaggaactgagggtggcggtgttcagtctgttcccagggttttgagaactggtgcagtgcctaacaagcacacacgttccccttagtaaggaaatacggttaagaatgaagtaaaaaaaaaattgttttctttcaatttatgtgtctatatattttcattttttatgttaataaagacaaggtctcgctatgttgcccaggctgatctcaaactccttagctctacatattttcaaatggctactaacttcttaggacataagagcttaggttgtttagacctcaccagatgagaatggaactgttaggtatttctttgggggcgctatggaaaaaatgactgaattactaaggtctggtgcaccaagcaagtccagagccacctgcaccagggcacaggggttgagagcctgggctctggagtcagaagacctaggtttgccacctcactttgccatccttgggcattgtgcgacctctgcgcctgtaaaacgggaatagttaacagttgtgggattagtgacaaagcccatagaaaacattcagacaggccgggcgtggtggcgggcgcctgtagtcccagctactcgggaggctgaggcaggagaatggcgtgaacccgggaggcggagcttgcagtgagccgagatcgtgccactgcactccagcctgggcgacagagcgagactccctctcaaaaacaaacgaacaaaaacattcagacaatccctggcatgtcttagcaggcgataaatgttagttttataaatttatttatttaaccaaaatggactcattctacatatgtatttctatcatttttttccttattattatctggacatttttttctaggcaggcctgtaaggatctttctttctttctcttgccttccttcttttttttcttttttcttttttttttttttttttttttttgagacagggtcttgctctgtcactcgggttggagtgcagtagcacgatctcagctaactgcagcctccatctcctgggctcaagctatctcctcccacctcagcctcctgaatagctgggaacacatgccaccacgcccgactaattttttgtagagacagggtttcaccatgttgcccagtcttttctcactcctgagctcaagccatcctcctgcctcagcctcccaaagtgctggaattataggcatgagccactgcgcctgggcaactgttctttctaatagccccctagtctgcatccttcagggacttcttaaagtaaaaacgtccagccaggcgcagtggctcacgcctgtaatcccagcactttgggaggccgaggtgggtggatcacgaggtcaggagatcaagaccaccctggccaatatggtgaaaccccgtctctactaaaaatacaaaaattagccgggcatggtgacacgtgcctgtaatctcagctactcggaggctgaggcaagagaatcactggaaccagggagctggaggttgcagtgagctgagattgcaccactgcactccaacctggtgacagagcgagactccgtctcaaaaaaaaaaaaaaaaaaagaaaaaagaactccaagacttcaaggttcccctgaagcttggatgcaaacgtaaagcctgacctatcctcattgataaataggcccttattctcccttcccttccattacttccctccttctcataggaaggcattccatttcttcatcctgccatttgaggcctctgcctctgtgtcctgccctggctaaggcccctgcctctgtctccaccatgccttgtgaccctggagaggtccctcaattccttaagccacaggttcctcatctatataatggggatgataataatagaagctgcatccctgggctgctgtgagaattacagagttcaacccccaaggctatgacgaatctgcccgtagtaaagagtgaggctgggggcggtggctcacccctgtaatcccagcactttgggaggccaaggcaggtggatcacttgagatcaggagttcaagaccagccaggccaacatggtgaaaccccgtctctactaaaaatacaaaaattagccaggtgtggtggcaggagcctgtaatcccagccattagggaggccgagggcagaagaatcgcttgagcccgggaggcaaaggttgcagtgaaccgagatcgcttcactgccctccagcctgggtgacaaagcgagactccttctcaaaaacaaacaaacaaaaaaccaaactgttcccctgaacttgtttttttgtggcagcgggtggcagctgggcctgtcagatagaggctgatttggaatcaagacatcggtcttttggggcaaccgttcagattctgtgagtttgaaaccacaaatgccaaagtttaaattgggagactggaccctgcaggcactatttaaatccctttttgtgttacaaatagtgaaccccccctgctgccatctgcaggccactaaagtgtccattccacatctgagtcctgggcgattctgaagtgggatcccgaggacagagatactaataagttggctcacgcctgtaatcgcagcactttgggaggccgaggcacgcagatcacgaggtcaggagttcgagaccagcctggccaacatggtgaaacctcgtctctactaaaaatacaaaaaattagctgggtgaggtggcgggagcctgtaatcccagctactcaggaggctgaggtaggagaatcacttgaaaccagaaggcggaggttgcagtgagctgagattgtgccactgcactccagcctgggcgacagagcgagactccgtcaagaaaggaagggaggaagggaggaaggaaggaaggaagggagggagggaggaaggaaggaaggaagggaaaggaaggaaatgaaggaataagaaaaaagaaaataaaagcaaaggaaaagaaaagagaaaagaaaagaagaaagaaaaagttgtgtccattcccgagtcaaacttagactccggacctcttttcccagctgccgccagggggcgcaacgtggctcattgtctccaaaaaacagccgctgtcaattcttcccttccccgtatgcccctggtacctccccccgtcaagaggtgaagtctatttcccttccgcttgaatccagactagccttatgacttggtttgaccaagaagttgagtcccatcgaatgactcctcttctcttcaaatcctcttatggcttcctatgtcactaaaggtcaaagccagagtccttataacagggtctggacctgttcagtgcagcagccactactgacatggggatattttaatttcaatgtaactaaatacaattaaacatccacatcctgaagtcacagtagctacatcgcaagtgctcaagagccacacgtggccagtggctaccacatcacgcagtgctggtgcaggacactgccaccatcgcacgcagttctcttgcacagctcaggtctacacactccgcctccatctcaccccctgccttgtttcccacctccctctctgtgtctccccccgtggcttcagccacccaggtctccgggtcacaccaggcatattcctgcctcagggcctttgcactgctgttctctttcttcaaatgtcacattcccagggagggcttccctgaccacctataaaaatgtaacccaggctgggcgcagtggctcacccctgtaatcccagcactttgggaggctgaagcgggcggatcacctgaggttggaagttcaagaccagcctgaacaacacggagaaaccccgtctctactaaaaatataaaattagccgggcgtggtggtgcatgcctgtaatcccagctactcagaaggctgaagcaggagaatcgcttgaatccagaaggtggagattgcggtgagcggagatcgcggtgagcggagatcgcgccactgcactccagcctgggcaacaagagcgaaactgcatctcaaaaacaaacaaacaaacaaaccctagcctggctcggtggctcacgcctgtaatcccagcactttgggaggccgaggcgggtggatcacttaaggtcaggagttcgagaccagcctggccaacatggagaaactccgtctctattaaaatacacaaaaattagccacgcgtggtggcgcgcgcctgtaatcccagctactcgggaggctgaggcacgagaatcgcttgaacccgggaggcagaggggcagtgagctgagatcgtgccactgcactccagcctgggtgacagagcaagaccccgtctcaaaaagaaaaaaaaaaagtgaccttttctgcacttgctcgctttatttttcggagctctgattgccctggttcactcatttgtttctcaatagcacgccgacttgtcaggaaggttaatagaggaaattggtgacacagacattgcaatcaggaagggctgagagtagcaagtcaggtgggctcaccattagcaatgcagggagctgctgtctcgtgaggattggaggagccacgtggaaaatgctgctgcccggagcccaggtggctgcgctggccagggagaagcccctggttggcggcggtggccgtcactgctgctgctgcttctgcagccaccacggcccaagcatcccccagatggcgtccccttcctctggcttcctctcccgtagcaacagcagtccctgcagaggactctggagtggtggttgcggggtcctaccccgcagggggcaggtgggcgtggcggggagaggcagtagagtcgctcagggtcagctctgacctgtccccgcggtgttcccggccccagcagctgctcagttatttgtcgagtgctgacggtcggtcggaagaaaccacccggactgaggaaggctgaccccagatgcgcctagttgggaatgtgctggaaagatacgccccctggagggagtgcgcccaggaagtggggaggagcgtttgagatcgaaggagtggccgcgtaaaggccctgaggtctcgcaaggaagggtcccggggcgtcccaggccctgttctaggtgcaagaaacaggaacctcctggagcgagcatgcggtggggaggcagggggtacgcctcctacatgaggaggagatccacgcattaggaagtgaggcctgctggggacaaaagtctggcaggcagggccccaggagggccggggcaggagagggtttgcagtcatcgtaaacggggcggcatggaaagccctcactgagaaggtgccaaagaccccaaggaggtgaggggttgcggccggcagatgcctggggaaagcgcatgaccggaagcgcaggaagagccaggttaaaagccccaagccagagtgtgataatatggggctgttaatgtgtgactactgcccctcccgtgccaggctcggtgctggcgtaggggaggcagtggggccaaagaaggccacctgcctccatggtggtcgctgtcgggttggatttccacgtgcctggagtttaaaagtgaggcagcctggaaatgagcttgcagagttcgctgggggcgtgggggaggtttggccgtgcagactttcagatagcgggcccaggcagggacctcgatcctgaacccgcccccaccccgatcccggagccagctcagacacaggggcgcctgaaaactcctagggacatgaccaggtgctggagggagggagaagtctgggttccggggacagaaaaagacagtccctaccgccaacgggttccccagacccggtttccactgaggccccaccttccccagcgcagtcttcgccccttgcataggaggccacatctcctacacgtagatatgcagagagcgtgtcaacgcgcaagagctgcagcgccccatttaaccaccaagaggctccagggccgctggttaaaatcgtgcgggaagagatagcttgacgccaggagttcaagaccggcccgagcaaaatagtgacccacccccaacccccgctccccgcctctcgtctatacaaaaataaatatacataaataaaataaaataagcaaataaatattacatcgtgccggcgatggtgtttcccgagcactcgaagcgcctaagttttccctggcctttgaacgctagactgcagaaagcggcaggacagcggttctcaaagtcaggttctggaccagctgcgccaacgtctcctgggaactagatacacatgttcgggcccacccgagacctacagaacccctttgggcaggcagcccggcaagctgaattttcgaaggaccccccaggcacctgcgatacgggaccagttggagaaacggtccggcatcacagtttgagaccccagatgtggggtctgatggtctctaggacccctagggtcacagttgtcagccccggctgcccattgctgggaatcacctgggaagctttagggactgttgctgccccagcggaggcctggcaccatcccgagattcccagagtgggtcctgtgtgcatgctggacatgggctccgggtcatttcagggacagccggggcggggactgctgccctggggtctctgtcaaggccgatgtgtgcagtgaaaaactggccgctgctgatacctagcaggaataagacgagatgacgtctcctagggttgattggagcacgaacacatcacacccttttcagtaccctgagcaatgctggaaggaaagctctgctatgatccccctttcccatgaggacatggagtcacagagaggtcaagttaccagcccaaggtcacacagcttgcaaggagcggtgctgggggagccaggcagctgagctccaaattgctctcctgtcacaccctgtgggcctgggagggagacccacaaatcagaaatccttccacccccatgtctttttttttttttttttttttgacagaatctcgctctgtcacctaggctggagtgcagtggtgcaatctcggctcactgcaacctccgcctcctgggttcaaacaattctcatgcctcagcctcccaagtagctgggattacaagcacctgccatcacgtccagctaatttttgtatttacagtagagacggatttttgccatgttggccaggctggtctcaaactcctgacctcaagtgatctgcccatctcgaccccccaaagtgttggaattataggcgtgagacactgtacgcagcccctccacccccatgtctcagggtggcatccctcccttccatgtctgtgttctggaatcacctgtggcctcttattttcctctttggtaaaaatgaggagcagctgggtcgggcacggtggctcacgcctgtaatcccagtactttgggaggccgaggcgggcggatcacgaggtcaggagatcaagaccatcctaacacagtgaaaccccatctctactaaaaatacaaaaaaattagctgggcgtgatggagggtgcctgtagtcccagctactagggaggctgaggcaggagaatggcgtgaacccagcaggcggagtttgcagtaagccgagatcgcgccactgcactccagcctgggtgacagagcgagactctgtcacaaaaacaaacaaacaaacaaacaaacaaacaatgaggagcagctggactggtccagatgaaggctgattcagagaccaatctctggtttcctgggcttcctcttggaaaccttcgtgcatttgaaaccacaccccagaggcatcaagggactgactggccctgcaggtgctgtttgaaggcccctgcgctgaaatataatagcgaacactctgttctgtctcagttactagagggctcccctacctgtggggcctccctgaatgctcacggtggggatgctgggaacagttcagaaaaggttgtgttcactcggggggcaacaaattttgactcagtgggggatagacttgcccaaagcctcagggccacccagaaaggctatgcaaataagacccagggatggccgggtatacaagtaagactgggggggctgaggcacgagaattgcttgaacccgggaggcagaggttgcagtgagttgagatcccaccactgcactccagcctggttgacagagactctgcctaaaaacaaaaacaaaaacaaacaaaaaaacccagggagacggtgtgaaactgtttcttttttcttttttgagacagggttttgcttgttgcccaggttggagtacaatagcgcaatctcagctcgccgcaacctcctgggttcaactgatcctcctcctacctcagcctcccgagtagctgggattacaggcatgcaccatcatgcccagctaattttttgtatttttagtacagatggggtttcaccatgttggccaggctggtctcgaactcctgacttcaggtgatccacccacctcggcctcccaaaatgctgggattacaggcgtgagccaccgcgcccggctgtgaaactttctgcaagcatctgtgtgtctgtgactgcctggcttttgagtttgtgtgataacatgtgagtgtgtccatctggctgagggaatcaaagtgtccaacggcatctagcagtgtgtgacgggtcctgagtgggtgaacacgttgacatttccaagtatgtcagtgtttgtatgaatgggtctgtgaatgtgtgggggttggcttcccggagcacagtgggtctgtgcgcctctgtgagtacacgtgtgtgtactacatgtgtgtgtccgtgtctgtgtctatgtatgggcagattaatcataatttctgttggtgaatgtgggtctgccagtggtgcctgagtgtacatgtgtctgtggtatgtgctgtgcctgcgtgcctggatccgagtgtgcatgtgtctatgtgtgtgtccacacgtgtatggcagtgagagagactgacccagtgttgcctgatgtctgtgaaatccacgcagctcctcgtttaactccatcttgccacttgtttggggtccacaccactttccttctcatgggcccctgatgttcccccgagacccccccccccccatagctctgggcgctgcagggaggaggagcagagagactcgctctgagccttcatttcctgcattcatgccgtcggctcctccagtctccgaatccctccaaacatctgtctctgctgttcctttttaccttccagctcctcaggcaggccaggtccccatggtcacgagacctctgccctccgaagtgggcagcgacaaaggacagcctccctccccaccaaccagaaccttcccacccagcctgtcttcctccgcgcacctgcaaagcctcccctccaggtgaggtccacagcttgtatttcttccaaacctcccagggcctcgttcttgctgtgagccgtggactacacggccaagtatccaccagcatgcacaaagcggctctagcaaggccatgcggcgcgccaggcagcaagcagcaccagcagtaaccactccactcagaaaagagcaggggtggggcgcggtggctcactcccatagtcccagagctgaggccagaggatcgcttgatcccaagagtgcaagtgagccgtgattgcaacaccacactccagcctgggtgacagagccagaccctgtcttgaaagaaagaaaagagtaaagaaaagagagaaagagaaaggaaagaaagcaagagagagagagaaagagagagggagggagggaggaagaaagaaagagggaaggaaggaaggaaggaaaggagggagggtgggagggggaaggggagggagagggagaggggagggagagagggagaggggaggggagtggagggagagagggagaggggaggggagtggagggagagagggagaggggaggggagggagggaaggggaggggagggagggaaggagggaggagggtggaagagagaaaaacaaaaggagggtggtgggatagaattctttactttcctgaggaaaaaaataagaaacttaggccaggcctgcaaccagttaggaagacagactggcctttggacctccacgaactctcttttctcctgccctcagcaaggctagagtgtggtcatttgctgtttttcactgctaggggttgtggggacacaaggcaatacaggcccccagcttcctcctaacctccacagggctttagcaacccagtttcttcccaattataggaagcagttggccgcgtgcagtggctcatgcctgtaatcccagcactttgggaagcagaggtgggcagatcagctgaggttaggagttcaagacaagcttggccaatatggtgaaacctcatctctactaaaaatacaaaaattagccaggtgtggtggcacacacctgtagtcccagctattcgggaggctgagggaggagaatcgcttgaaccagggaggcggagatggcagtgagccgagatcgtgccactgcactccagcctgggagacagagagtgagattccatctccaaaaagaaaaaaaaaaatgcagcagcaattaatgcacaatacacacagcctctttttttttttttttttttttttttttttgagacagagtctcactgtgtcactaggctggagtgcaatggcacaatctcggctcactgcaacctccacctcctgggttcaagagattctcttgcctcagcctccagagtagctgggactacaggcgtgcgccacaaggccagtctaatttttgtatttttattagagacggggtttcaccacgttggccaggatggtctcgatctcttgacctcgtgatccacccgccttggcctccctaagtgctgggattacaggcgtgagccaccatgcccggccaaccacagcccctcttttgggccttttcctattgcaatgatttttcaatgtgtccagtggccgagttgcccagatgtccgtggagcttgatgcaaacagaattcagagccacacaggcaccgctagcaaatccacacctctggtgccgagggccccagaatctgtgttttgaatgcatttttcagacgcttttactgtaccttataaccaagatcgggtgaggtgtgcaaaccaagggccctgtcccctccaaaccagcagagcccggggcatgaggatggcaagcgaagtgacaacataaacacaggtgtctccatcatcaaggatgggagtggaacggacagcaagggccaggtcacccccagagcattcgtcagttgtcaagtccaaagctaagaaatcagttcataaatgttttttgatttgcatgttggctcaactctttttaagtccaaggaggcagtccacattaagtgtgcaggcaaaaaagagatggaaaaaggagtcagtttctcccctgccctccctctctccctttatcaagctgagcaccttgagttgcatttgaggaaatgaaaactataggtgacgcaaccccattgtgtcgaattctttctttacattttttgggttgctacaaggaatcagtattttttttttttaatcagatggtgtgtgtggtggctcacatctgtaatcccagcattttgggaggccgaggcaggaggatcacttgaggccagaagtttgaggctgcagtgagttatgatcatgccactgcactccagcctgggcaacagagtgagaccctgtctctaaaaaatttaaaaaaaaatcaaagcatgaacaaaactttaacaagagaataaagagggttgttaggtggagacgtggccagcactccacctccactttgaagttcagaggcagagcatctctccctcccacacttggagggagggcccgtgggctgtctctagccctcacctcacagctggtcttcttgctctccctgctcagcttctgctctggcctcggccctcagcaccctgaggttcctggcctctcctgccctggggactctcttgggcagggttggcaaccggggagtgtgccagaaggctctccggcgcttgcaaaaccacgaaaagcgtccaggggtctggaacctcactgtcttgacctgtttccgggccctggctcctggagctgttcctgtggtcccttgggcagctgagacttcagcttcctggatacctggggcccctgccctctgattatgtgcagcctctgccctctggccagcccgggcctgtgccctctgattatctgcaccctggacagctggggccctttccctctggtcatgtacggcctcttccctttgattatctgtaacctctgacccctggtcagctggggcctccgccctctgattatctgcagcctcttccctgtggttatctgtgccctgtgacctctggtcagctggggcctctgccctctgattatctgcagcctcttccctctggttatctgcagcctctgccccctcctcagctggggcccctgccctctgattatctgcagcctcttccctctgattatctgcagcctctgccccctggtcagctggggcccctgccctctgattacctgcagccccttcccgctggtcagctatggcctcttccctttgactatctgcagcctctcccccctgatcagcctcgatgtctgccccctgacctgtgggtgctgtctgctccttcctgcggcgccgaaaggaggcccagttgatcttgggcctccatcgcctaggggaagcctggggcacacaaacatctcccgcgtttcccaagcgatcccccgggctggtgccctctggcgccgatgatacccctgcgctctccactgcggtggaggccagccgggcctcgcccaccccggggcccgccctcggcgcccaacccttcaccctccgcttcagcttcccccaggacacctggctgacatactcccgccacctgtccgctttggacagctgaggccccaggttgtcctcaaacatgggcactggcaggttgacgcggcggcgggcaggcggcgcgctgggctgcttctcctgtcgccggaggaaggcctcgaccagttcctcatcatcctcactctccaggtcgcttcccaggaacttgctgcccaggtagctgacgggcattttgcgcaccttcttgccccgccgcgggccctggcggctcttgtctctggaggtctcgaagtcgctgaactcgctgtcgctggcgttgctgctgtcgtacgtgcccacgaccagccggggcggaggagtcaccatctgctgcactctcctcctcactcggggctccttgggctttttggggggctggggcgggtgcggggtgctcttctccatgatgcgggccacgtcctccagggtgcggccctcttcttccaggaactgggtcagccgctcccgaaattctgcttccttggtggcgggcttagagatgactctccagacgcccccagccagcctgacctcccgggggatgagcaaatagtcgacgtcctccccgatctgcagcatccccaccgtggagtcctcctccttgcggaacaccttgccgatcttcttaaatgtccccacgggctttagggcttccacgaggacgtccaaatccacatctttgcagacatcggggacgctccaaagaatgaggcagtcgggggacggcaggaagccccaggggaaccagccccccacgtggcttttctcgagagtctttaagatctccagggtgatatctggggtgagggggcaatgagccccaacaaactactgtagcccttagtcttgagggagggactggatggggggagttccagcaacgctgaccggagagtctcacctccctagccagggacgagccaaacgcctccaatctcttcgcctgcaacaagtacagtcttgaccaagtccggctcccccaccaaggacttgggggaatcaatttccaggatgcctacgtgagccgggggcgaggtcagtcccaaggctcaaggcccactccaagctggaaacgtggtgtcccagctccaagttggggcgcgcgggctgccagcgactcttcctgccccaggccccagggacgcggctggaacttgggacaggacttcgcagacaaagacggtccagtcgaagctattcaatatggccgaggcgctgggaggccccagcccgggcctccagtagggtcccccgcccccaggcaggccgccacccagctccaggctgaccttgacgcgccgcagcctgccagcccgcgcgcttagagctctgcaccgtggagcgcgcgggcaggaagttcctcctcgccctccgccagaatgaggcccaccttcccccgtctcatcttacactcccagactctggaagactgacaggggggctgtccactcccttcggggcggcctccttcccctcccccacaggggtgtggccgcgccccgggcctagctgggcccattgcttcccagcgaagcggcagtggcccacgtcagcacctttcctgaaaggcagcggttcccaaacctgccatccgaaatgtgcaagtttccagccaagtccgggaggtgggtgtgctagtggattctactttttgagagccactggcaccacagattagcattttaaattcacgcgactatcggtacccgtacacctatatgcgtgggtagagaaatgggtacctgactgcaacagtcccactgtggcgcttggcaggtcagggctcaatacatatttttgaggggatgaataaacccaaatgttcatggccaggcgcggtggctcatgcctgtaatgccagcactttgggaggcccaggtgggtggaacacttgaggccaggagttcgagaccagcctgcccaacatggtgaaaccctcgtctctaccccgggtgtggtggtgcgcgtgcgtagtcccaagctacgcgagaggctgaggcaggagaatggcgtgaacctgggaggtggaggttgcagagatcgcgccactgcactccggcctgcgcaacagagggagactgtctcaaaaaaacaaaagtgcaaaaaaacccctacaaataaacaacaacaaaaaaccctaaaagttcacgagtagagactgcctctattttatggtagtatcttacagtgaaatattttgcaacttcgaaaaaagaatgagatggctaaggataggcacggtttatgaggcgcttcctatgtagtaggcaccattcccagtgctttctatgaatgaactcaggaaatccttgctataacaggagactggtagcatgagtacaattcccattagacagctgaggaaactgaggcccaaggacataaaaccacactctcaaggtcacagccatggggagtggttgagtttggatttgaatccagaatagtctgccttttgtgtcgaccaaagagtcaagatggccaggcgcggtggctcacgcctgtaatcccagccctttgggaggctgaggcgggcagatcacgaggtcaggagatcaagacaagaccatcctggctaacgcggtgaaaccctgtctctactaaaaatgcaaaaaaattagccgcgcgtggtggtacgtgcctgtagtcccagctactcgggaggctgaggcagaagaatctcttgaacccgggaggcggaggttgcagtgagccgcgatcgcaccactgcactccagcctggacgacagagcaagactccgtctcaaaaaaaaaaaaagaaagaaagaaagaaaaaaaagaatcaagatgtgaaccaatgctagtcgcattcggccgggagctcggttcttgagacgcgagtctaccgaagctcccgccagttgagaggcgagtctgccgaagctcccggccgaaaaagccaaatccttccttaacccagtgtctgaggggttttgtccgtggctcctcctgctacaggacatgcgactagcattggtccacatctttggaaccaggcatccagagacatgttgaataggcctcgttgttaggaaccctcagaggtacatggtaaggccagtgccatcaatcatctttttacagacggtgaaactgaggctggtctgaagttgcacagctctgagtggtggatctaatataatattagaaccagatcttgggcactagcatttaaaacactagctgacgctaaagacacagctaatccccttctcctaaatgtgttgcaccatttaaccacttagcagccacaatacttgcagccactcttgcctggatgtgtacaaagccccctcactgggcttcccgcctccccatcactgcttgcaatccaggccccatccagaagctgggggcatcttttaaaaacttaggtccgatctgtctctactcttttgaaaattctccatctcaggctgggcgccgtggctcacgcctttaatccagcactttgggaggctgaggcgggcggatcacctgaggtccggagtttgagaccagcctggtcaacatggcaaaaccccatctctactaaaaaatacaaaaattgccgggcgcggtggctcacgcttgtaatcccagcattttgggaggctgaagcgggtggatcacctgaggtcagaagtttgagaccagcctggccaacatggtgaaaccccgcctctactaaaactacaaaactagcctgtcttggtggcgcatgcctgtaatcccagctactccggaggctcaggcaggagaatcgtttgaatccgggattcagaggttgcagtgagctgagaccgtgccattgcactccagcctgggcaacaagagcgaaactccgtctcaaaaacaaacaaacaaaaaaaagaaacgaacaaaaatataagaattagccgggcatggtgacacatgcctgtaatcccagctactggggaggctgaggcagaagaatcgcttgaactgggaggcggaggttgcagtgagccaagatcgcgccactgccctccaccttgggcgacagagcgagactccgtctcaaataaataaataaatgtgatcttatttaactcataaaggaaccaggcaaatttttaaagagggaacggaggaaaaagagacgggccagagggaaagaaaagatgtgggggcttaggggacgttaaggtctcagcgagcggcctgttcacaattaccggcttattcaggttgtttttctcttgcagagccaggtcgttgggcttcgctggatttttctcctctttctccctggctcagtcccagccgccgcgctcagcccccgggcctcccgcggccccgcccctcgcctcccccttcgcacagtttgtggcctccgcagtccggcggtctccatggcaaccacgggacgcgctcctccgcgcggatcaaaactaagcgggtggggcggaggcggaggcgaggctgcagggagatggtgggggtgggggcgccacggaggacgagggcaggagctcctcttttctgcccctggtgcctcccttaggcctcatccccaaagccagcttccctgaaaagctgtttgtagaaaccaaaaaatgaaaaatcctaaggacacctaggtttcaggaatgctgattaaagaatcgcaagtctgagggctcatgacagtgccttccaagtggtgacctcgcagatgagacgtttgggttttgtagtcataaaagggctttcgttttgtttgtttgttttgttttttgtttgtttttctttttttatttggtgggggagcagggagcggcgcaaggaggataatctaagaaatgaaaatcccaaatgttccatatttttgcaaaaatcgtcaacctccggccgggggcggtgactcatgcctgtaatcccagcactttgggaagccaaggcaggaggatcgcttgagcccaggaattggagaccagcctgggcaacatagcgagactccggtctccacaaaaaatttaaaaattagccgaatattatggtgtgcgcctgtggtctgagctactcgggagactgaggtgggcctatcgcttgagcccgggaggtcagggctgcaggaagcggagatcgcccatctgcacgccagcctgggcaacagagcgagactccatctcaaaaaaaaaaaaaattgccagcccctgaacggttcagctgtgggtgtttttaattgcacagatctctggcaggtgagacccttctccagccatcacagaataaaataataaaaacgagaactgtagcctcacttttgcatttgtttaaaataaatggaaagttggaaaagaatggggaagagaaacaaaacacggctgaaatccctctacccagctacattttgttgccatttaaaaaaaaaatgggacacgcgggccaggggcagtggctcaagcttgtaatccaagcaatttgggaggcctacgcgggcgatcgcctgaagtcaggagttcgagaccagcctggccaatatgatgaaaccccaccgtctctactaaaagtacaaaaattagctgggcacgatggcaggcgcccgtaatctcagctactagggaggctgaggcaggagaatcgcttgaacctgggaggcacaggttgcagtgagctgaggtggtgccactgtactccagcttgggcaacagagtaacaccctgtctcaaaaaaggatacacggtcagaaaaagcaaaagttacagaaaggtaaatttttttcaaaaaaggattcttctccccaaaccccaccttccagcctctccccaaaaagtaaccagttaaatatctctgtatttttccagagaaaaaatgcttgcattagtgtatgtgttaattttattttattttattaatttatttttttttttttgagacggagttttgctcttattgcccaggctagagtgcaatggcgcgatctccgactcaccacaacctccacctcccgcgttcaagcaattctcccgcctcagcctccagagcagctgggattacaggccaacccacccagctaattttgtatttttagtagagacgggatgtctccatgttgatcagggtggtctcgatctcgaacctcaggtgatccacccaccttggcctcccaaagtgctgggattacaggcgtgagccacttcacctggcttttttttttatgttaattttagaatttatctcacagagatttttttcccccatcatcctaaattattttcatcacagcacttaccactttctgtttttgtttttttttttctttgagacagggtctcactctgtcacccaggctgaagtgcagtggcatgatcatggctcactgtaacctcgaaatcctgggctcaagcaatcctcccacctcagccttctgagtgtctggggctacaggtgtgtgccaccatgcctggctatttttaaaaattttttgtagagaggtattctcattatgttgcccagaccggtcttgaactcctggcctcaactgatgctcctgcctctgggtctcaaagtgctgggattacaggcgagaggcaccacgctgggcctatttgtatgtacttatttattgtttcaccctattagaatactatccccatgaggtctgggatatgagtctggtttgttcactgctgaagtctcagcatctagaacacttcaggtaggagctacaaatatttattaactgaatgaatgctgagaattgcactagatttattactataaaatgtgttttcacttaatgtccttctgtatcagtgcttgccagtctgtttttgtttgtcacgacagcttccatctttattccttcaagccaggaacgtgatactgataataattcatttttactgagcacctactttatccttggccctgtgcattttctcattcagtccttagaacccttccttaagcaaatgttattcccatttttcagattaaaaaaaaaaactgagtccaaggaaagtcacacagctaggtagtggcagagccaagctttgaatcactcaggtttattagattccaatctccacacactttttgtttgtttgtttgttgtttgtttgtttgttttgagacagggtcttgctctgtcgcccagtgatacgatttctgctcacttcagcctcgacctcctgggctcaagctatcctcccatctcagcttcccaagtagctgggactacaggcccatgtcaccatgcccagctaattttttgtaaagttggagtttcgccatattttccaggctaatctcgaactcctgggctcaagtgatcctcctacctcagccttccaaagtgctggcattacagatggaagccaccatgcctggccccaatctccacactcagtggggtggatcgcttgagcccaggagttcaagaccagcctgggcaacatagcaaaaccccatctctacaaaaatagtacaaaaaattagctggacgtggtggtgcaagcctgtagtcccatctactcgggaggctgaggtgggaggagcatctgagcataggatgtccaggctgcagtgagccattatcgcaccactacaccccagcctgggtgacagagtgagacgctgtctcaaaaaagtttagaaaaaagaggccaagggctgggcacagtggctcgcgcctgtaatcccagcactttgagaggccgaggcgggcagatcacaaggtcaggagatcgagaccatcctggctaacacagtgaaaccccatctctaccaaaaatacaaaaaattagccggccgcggtgacaggtgcctgtagtcccagctactcgggaggctgaggcaggagaatggcgtgaacccgggaggcggaggttgcagtgagccgagatcgcaccaaggcactccagcctgggagacagagtgagactctgtttcaaaaaaaaaaagaaaagaaaagaaagaaagaaaaagaaaaaggaggccaaggaagataacacagaggcaaaggcgtacagagtggaggaggcgatgtggatgtaaccctgtaggcagaggctggagagatgcagtcagcagccaaggaactcctggagccaccggaagcttgaagaggcaagcaagttcctccgcctggagcctctggaaggagctcagccttgccaacagcttgattttggatttctgtcctccagaaccatgagagaatacatttgtgatgttttaagccatctagtatatggtaatgtgtcacaacagccacaggaaacgaatacagagcccgttgtgtggccacgaattcccctgagtccagtgagggcaattccaaattaaaacatgctaattttattctgtgaccttgtctctcaggaataattatccctgaagcgaaagaattcttgtacagtgtcctgcgccctaggaattacatatgggtgacgggcaccttggaagtggtggggtttttggttttttttttttttagactgagtctcgctgtgttgcccaggctagagtgcagtggccccatcttggctcactacaacttccacctcccgggttcaagcaattctgcctcagcctctggagtacgtgggattataggcatgcgctaccatgcccagttaatttttgtatttttagtagagacgggctttcaccatgttggccaggctggtctcaaactcctgacctcaagtgatccacccactgtggcctcccaaagtgctgggaatacaggcgtgagccactgtgcccaaccactgctctgatttctgtccctatagtgtttttttagttttatgtaaaaggaagtatatagtgtgtgtcctttttggtctgacttctttgactccgcataacgcttctgaggttcaccgatgttgctgtacgcatctgaggttcattccttttttttttttttttttttgagacggagtcttactctgtcaccaaactgtgacaggaggagtgctgtggcacaatcttggctcaccacaacctccgcctccccggttcaagcaattcttctgcctcagcctcccgagtagctgggactacaggcacccgccaccacgcccagctagtttttgtctttttagtagagacagggtttcaccatgttggccaggatggtctcgatctcttgacctcatgatctgcccgcctcagcctcccaaggtgctgggagggcgaccgcgcccggccagtacattcttttttgttgctaggtcatattctgttgcatgaatacattgcagtttgtttattcattcacctgtcgtcggccatcgagttgtttctagtttttggttcttagaaataaagctgctgccgggcgccgtggctcacgcctgtaatcccagcactttgggaggccgagacaggcggatcacgaggtcaggagatcgagaccatcctgactaacacagtgaaaccccgtctctactaaaaatacaaaaaaaattagctgggcgtggtggcgggcgcctgtagtcccagctactagggagactgaggcaggagaatggcgtgaaccctggaggcggagcttgcagtgagctgagatcgcgccactgcactccagcctgggtaacagagtgagactccgtctcaaaaaataaaaaagaaaaaaaaaaaaagaaagcctgaagggcgactgaaagtcagagggaacagcaggtgaagagctgtgtgctctgtgcccacctaggcacatatgcccaccccttccctgttccccccaacttcctgccccatcagccaggggtcccacagcaccagagggcacatgcagctgggatatacgtatatatatgtttttttcctttttgagacggagtcttactctgtcgcccaggctggagtgcagtagcatgatcttggctcactggaacctctgcctcccagctttatgctattctcccacctcagcctcccgagtagctgggattacaggtgcgcaacaccacgcccggctaatttttgtatttttagttgagacggggtttcaccatgttggccaggctggtctcaaactcctagcctcaagtgatccacctgcctcagcctccaaaagtgctgggattacaggcgtgaaccactgcacctggccggaatcacaagttatgtgtcggtcactcagagactcagagactgccttcagaatccctgtttctcaccaaggactgttgggaggaggcctcagggtgctgtctccctggatccaccaagacctcattcctctttgtgctgtgccagccctccatgtggtggagcacgtgggctctggagctaggctgcctgggttcaaattctggctctatcaccctgtggctgtgtgatcttgggtcagttccttcacctctctgagccttggcttccttctctgcaaaatggcagttgtaatgagacttaacctcatggagaggttgtgagcagttcacgagaccatgataggtattggcacagaacccagggatggtaaatgctcacagttattagaaaaggcagagtgggccaggcatggtggctcatgcctgtaatcccagcactttgggaggccaaggcgggcagatcacaaggtcaggagatcgagaccatcctggctaacatggtgacaccctgactctactaaaaatacaaaaaattagccgggcgtagtggcacgcgcctttagtcccagctacttgggaggctgaggcaggagaatcacttgaacctaggaggcggaggttgcagtgagccaagatcgcaccacaacactccagcctgggccacagagcgagactccatctcaaaaaaaaaaaaaaaaaaaaaagcagtgtggtctagctgtttgtagactcagttccggttcacatcctggctctgtttacaaatcgtgtggctctgtgcctcagtttccaaatctggagaatgagattgtatcagtctcatggtgttgagtcttatgaggattaaattgtttgtgtaaaatgcttagaatagtgcctggtagatatgattattcaatatgcacgaagattattctctgctctaagcccccacttagaaccagagcgtgtactgcagtttcaaacaggccctcagagtgccacccacctctggcttgtttctcaaggaatcctgaagaatttcttctgcccagccgtttaccagagaaatcatgctctatgactccgatgtcagctggggcctcccagactgagagagacccgaatcagtgtgaggagcacagaatgtggtcagaggcctgttttcaattcctgttgtgctttgctctgtagccttagacaagttacttagcctttctgagctttactttcttcatccatagaatgagatgatgatcttaataatagtacagtttgataatctaatctcttatctggtcttttttttttttttgagatgtaggggggtatcactctgtcatccaggctggagtgcagtggtgcaatcacagttcactgcagccttgatctgctggcctcaagcgatccttccacctcagcctccagagtagctgggactacaggtgcatgccaccgtgcctaatttttttttttttttttttagtttttgtagagataggggtcttgctgtgttgaccaggctggttttgaactcctggcctcaagcaattctcccaccttggcctcccaaagtactgggattacaggcgtgacccactgcacctagcccactacagaagtattgatgggattataagggcttcccgcatccccctgggaagtaaattctacaatataaggtatagtcactgtatcatttttctaaaatccaaaactctgaaccacatatacccctgaaaccacacctggctgagggtttttataagggattgtggacctatagggccataactcacagggttggcaggatatgatgggttaatgatatgaaggaatgtggcatagtgcctggaacacaagatagctgttactgtttttgtttcagttaaattgtttcacctttcacaccagccactggaaaatgacctgacatcctgagaagtccgtaggataaaagaaagctgtgtttccgccgggcgcggtggctcacacctgtaatcccagcactttgggaggcagaggcgggcagattacgaggtcaggagatcgagactatcctggctaacacggtgaaaccccgactctactaaaaatacaaaaaaattagccaggtgtggtggcaggtgcctgtagtcccagctacttgggaggctgaggcaggagaatagtgtgaacccgggaggcggagcttgcagtgagtcaagatcacgccactgcactccagcatgggcaacagagagagactctgtctcaaaaataaataagtacataaaaataaaaataaatgcagtcctggaagacttcaggccatggaagcagttttcagtacttgttttagcagccacatcatttttccaaattaaatcttacatggatttccccccatatgtcaaggggcagactatgatttcattagcatacatttattttatgagttcatatttgtacaaaagagcatctcaatcacaaagaacaatgaagagttttagctgaacccccttttgaaatcaggggtttacagaagccagatgcagccctccaacagctggcacattcaatttacttgtgaatttttgcttgggatttgccctaccagtgatgttttcactcagctaagtagcttcaaatggtgacagttttgcatgacaacttgcattggagtcccaggatacactttggtccagaaaatcttgaaagagaagtggtaggattttgatttcatgggcaacattgaacaaccacgcatgttgtgtatcacaaatataaatgttatacccctgaaatccacaataagcacaaaatacagtcttcatgctgcaatatgataagaaatgtcacactatcccttattatacaacgattatgccttgatgggagagcagcatgcaacaaacacgctggaggctttcgtagcatttattcaagctcagactctgggatgcaataacgaacacagtagtacaatattctgcgagtgggtatgcccaggctgggcatttacaaggaatagaaaaatcaggccgggcgtggtggctcacgcctgtaatcccaacactttgggaggccgaagtgggcggatcacaaggtcaggagattgagaccatcctggctaatacggtgaaaccctgtctctactaaaaatacaaaaattagctgggcgtggtggtgcgcacctgtagtcccagatactcaggaggctgaggcaggagaatcacttgaacccaggaagcagaggttgcagtgagccaagatcgtgccactgcactccagcctgggctacagaaggagactccacctcaaaaaaaaaaaaaaaaaaaaaaaaagaatcaacagagaagctgggcgcagtggcttacacctgcaatcccagcactttgggagaccaaggcgggagattgagaccatcctggccaacatggtgaaaccctttctctagtaaaaatacaaaatttagctggacgtggtggttcatgcctgtaatcctagctactagggaggctgaggcaggagaatcgcttggaccagggagtcagaggttgcagtgagctgagattgcacctctgcactccagcctggtgacagagcgagactctgtctcaaaaaaaaaagacgttaggagtctctgacattacaatttggtaggctgagtctttgtgttgtgtgtaagttacatttttgaaaagagattcagtcaaacctttgcagatccttgaactaacaagtttgcaaattgacaggtccgttgtctctgagcaaaagatctgcctactcacatgtatttggattttacctgatttttaaaattcttcttcacctcagtgttaacgtcgttcattggtaactcttgaaaatggcctcttaatgatttacctccttttggaccattgcccagaagccttgcctcttctttagagagtggagttcactcctcctcaccaagccagagcttctggaatttaacttggggagactcacaccctcaccccaggcgccaatcggggcagaagggtcccgcttctgaccacttctgtaagagagactcagcgtgtagagaaagacgacagcttttcaagagccgcttacagatcagtgagttcctcagaggtggggagcaggcaactcactctcagccatggtttctgcttgacatgcgcaaaacagggtggcccactccgaacaagtttgtgccagaggtacattcaaggtacatgcttttgaaacacagaaaacggctctagactttgcaataacaggatttccaggagggcgcaaagctagaggggtccgtgccgcccgcctccccccagcaagagaggctgtccccagaatcaggccgtgggtgacagccgaaggaggatggcggcccttctcccgagtagggatctccctgacacgttcctcctgggtctgcgtgagttttcttcaactccagtaagagatctgcaaaaccttggaatccaggaccgtttccacctcctccattttctgcaaagggcgcaggcgcctggggtcagcctgtggtctccatagcaacggtcggacgcgctgctaggttctggctctgactgcgcctgcgcggctggtcccgcggggtctcccgagtagcggaagatatttgtgggtctttgagacccttcctcgcttagaaattactctcatctactcaaatgatacccatacacatattcaggtgttacccgcacactctcaaatattacccacaactactttcaattatacgcggatgccacccacacactctaatgctacccacactcactaacgtgtattcaagtaacccaaatgttacccgcacctactcaaatagctactatgagagtcacgggcaaggttttggtctgtttattccccttctgtatccccagtgcctggcacactgtaggtcctcaggaaattttgttggttgcatggatacatggatgaatgagcaatccacactcaaccagattttatgatcattcagctgttacccacatgtactcaaatgctacctacgctcactctgatgtctccaagtaattcaaatattacccacttactctgagtgccatgaaggcagggatttttattgagtttactcccttccatatccccagctcctggaacatagtaggtatgcaataaatatctgtaagatgaataaatgagccacgggcacccagacgttaaccacacccactcagatgtaacccacaagttagttaactcagataaagatatccacctctttcgcactagtcagatgttacctgtgctatccaaatgatacccattcttactccaaagttacccactcactagagtcattcccaccctcccttgcattacccacactcactcgcactccttaaacgtagtgaggtggtacctaccctcccacagtcatcacccacaccccctcagacactccccacgcccacccgatgccaccacctcacagcttcttgtctgaggcgtgatgccgccggcggtttttcttgttcttccttttgcccctcttgccaactccagccttgctctccttctcggaggagtccagaggtggcaccacgtccatctggacggtggccccagcctccggtttctcccccagcccaggcacagagcactttcttgcaggcagctctctggggcccgtggctgggggacacagttcctgcctcaggacccgggccatatcctccaccgtcctgccctcgctctgcagaaagaggttcagcttggtcaggaattcaatgtcctgcttccggggcatgtagaccactctccacacaccgcccttgcccttgatctccctggggaccacggcgtaattgatgtcctccgtcagctgaatgatggccgccttggatttatcttcttccagataggccttcccagccacttcgaacttgcctagaggtttgaggggcagccgaataatctcttcgaattcctcgtggttgcagtcctccgggatccccaggatcatcagggacttgtaactgtccacctccagggccttgcacccgtgctccaacagtgcaatgtccttcaccccgaacagcatcttgcccaactctttgaggcagcagtatgcccgctggtggacacctgagctgcctcgggaatccacgaaattatccaggatgccgcgattccttcccaaaggctacgagagagtgaggcctcaggggccggaggccgctcccaggaccccttcgtccagctcagtgaaggatgcccccagcccctgcctgcagggctgtgcaacgtcggggcttctgtggctccctctgagtgggctcgaagattcccagggacttacgcgtgctggagaagcagaaggcggtgtttgccacctgactcgtggctcccgggtcctgggcaaggctgcaccaaggagggtctaaagatgatgcttcccctttcttggcgtggcctccgaaggtctcacaggccccaacggtctctccggatctgggactgctgatctccctgggacaactgccaacagagtgtcgtaggcgcggccctggcaggcagggaggcgcgtccctcaccgctggcccagaggttgcactcagtgccctgtcgccggactaggacgaggatgtggccgctgcacttgctcccgcggtgacgtcaccgcctccttccgctctgcggcctggcggtctccatggcaaccgctgaagcatccatctcctctgccattggccgactggccgcattgaaatcaagagtctgagggggtcattcggaggtgaggggtcggccaccagccctcagaagcgcccgcgattctcctttgaataatagccgattccaggggtgaggggacagcgaatgtacaagaggcacccggggcatcttttggggtcagaaagtaaggaagtgattaaaaaaaaaaaatgagaacacctggaaagacagaggaaccagcctgaaatgctcccactggccaaccctgggacaatttgagcatcaacgttaaaaatgaaagtaacagattataaccccttgaataaaattagaatctatgagttgatgtagatataagcacgtgaatgcaaagtttggtgaagaatgtgaactatcaaagtacctgcccatataatactcatcaaagggaacaaatgtatctttacagtggaatgttcttgcatgtaggacacacacacacacacacacacacactataatattcagagcgatatgacaatttagactcaaaatgcttcagaggataaaacattcttttttttttttttttttttttgagatgaagtctccctctgttgcccaggctagagtgcagtggcccgatcttggctcattgcaacctctgcctccccagttcaagcgattctcctgcctcagcttcccaagtagctgggattacaggcatgtgccaccaagctcagctaatttttgtatttttagtagagatgtagtttcaccatgtcggccaggctggtcttgaactcccaacctcaggtgatccatccacttcggcctcccaaaatgctaggattacaggccacagccattgcacctggccgcgaaaacattctttatactatatttgcaactcttctgtaggtttatggttgtttcaaataaatgtttaaaaataaataagaaatgtctcccccatgtgatgacatccacaatgtctattcctctcctccccagtccccattaataaagccaaaacatttgggttaggtcgacaccctttatacccccagttccagggataagccctgattggcttgaaccaattagcataatctcaccctccttcccacagtgattggttcagaaatggtcacccaggtaacctggacaaaaagcaattagtgcttaatatgcccctcttctctgagattggttaaaggttagacacgtgaactcagtaagtccagtcagaatgaaggtaaggatttctgcaactggtaagcggaggaagactctctctttcctcctagacgtgaaagactaagtataggagctacaggaggctgtcttggaagcatgacaaactctcttccttccttccttccttccttccttccttccttccttccttccttcttttttctttctttccttctttctttcagacagagtcttgctctgtcgcccaggctggagtgcagtggcgcgatctcgactcactgcaacctcaacctctcaggttcaagcaattctcctgccccagcctgtaaaacagctgagattacaggcgcccgccaccacgcccggctaactttttgtgtttttagtagagacagggtttcaccatgttgtccaggctggtctcaaactcctgacctcaagtgatccacctgccccggcctcccaaagtgctgggcttacaggcatgaaccaccgcgtccagccaataaacactttgaggatgaactttgcatctagaggaaggcagagttgagggaacaaccagaaaccaggccatagtcaggaagacatcatatgcctcaggatcaaacaacacctgaaaccgacatcccctgaaactttgtttttacacgtagtcagaagtgcacgaattataaatgaaaatccattaactgaacacatggtgtaaccagcacccaaatcagtaaatgaacatcatagcattcccagaggatatcctgtgctttctccaaatcactatatcctcttaagggaagccactatcttgactttcaacagcataggttagttttgcctgtttttgtattttacataaatggaatcacatattacgtggtctatgtttcttggtgaacatatatgtacatatccattagttttaagcctgaacaaatgccttagcagattctacaagtttcccaaactggtcgtaccattttattctcccaccaaacagtgtaaaaaaaaaaaatccagtttcgccacatgctcatcaatactagatttttttttttcctgagatggagttttgctcttgttgcccaggctagagtacaatggcacgatctcggctcactgcaagctccgcctcccgggttcacgccattcttctgcctcagcctcccgagtagctgggactacaggcgcccaccactaggcccggctaatttttttgtatttttagtagagacggggttttaccgtgttagccaggatggtctcgatctcctgacctcgtgatctgcacgtcttggcctctcaaagtgctgggattacaggcgtgagccaccgcgcccggcctgatgcctccggttttatagtcaggaaaaccgaagatcagagaggttaattcacttacctaaggtcacacagctagtgaatggcaaagctagacttcccgcctcagcaccctgactcctgggcgcacagatttaacattatacaataccatggagttccctgagaaaggggtcccatattgtgtcacgcggcttagttcctgttctgtcgtgaagtttctggatgacagttccctctctgggctgtatgttgattttgttcagtgccagtttagctaagctgggcttgtgtgtcctagaatagctttctgcaggtggctgttggttagagtcgtctaaaagagaaatgtgcattagatttacacagcggctggtgctgtgagaaggtctgcacagggtgccacatggctcatgcatttcatgactggtctgtgggctcaccttattggcttggggcagcctctgggactccacctgctcctgccggtctccttttcagcgtcggtgaacttggggccagcaccggagcagctctgtgggggcaaaaggcaccagcttcccctgcaggtcaagcgtggaattgaggttgaaggtgggaaaagagacgttggttgggggcgggggttccagtttgtcttcaaggattctaatttttttttttttttttttttttttttgagacggaatctcgctctgttgctcaggctggaatgcaatggtgccatctctgctcactgcaacctccacctcccgggttcaagcgattctccggcctcagcctcctgagtagctgggattacaggcacccgccatcatgcccagctaatttttgtattttcatagagatggggtttcaccatgttggccaggctggtctcgaactcctgacttcaaatgatccgcctgcctcaatctccaaaaatgctgggattgcaggagtgagccaccgcacctggcctagattgttcttgtaggttccaatttgtcctctctgtcccggttcagtttctaaattgcccagcagactggcctacagagacttaaaacccaatactagtcacagaaaaaaaaactttgatacacccctcctccagcaaccctagcgctccctggttagtaattttttttttttttttttttttttggagataagggtctctctatgttgcccaggctggtatcaaactcctgagttcaagtgattctcccacctcggcctcccaaagtgttgggattacaggcctgagccaccacgcccagcctcagtaacttttaaacaagatctcgccatccctatattattattattattttgccatcacgaatatagtttatttttaaatttttaatttttaattgtgcgggtacatggtagctgtatatatgtatggggttcacaagatatttgatacaggcatgcaatgagaaataatcacattgtggagaatgaagtcgccatccccttaagaacttatcctttgtgtgacaaacaatccaattacattcatttagctattttgaaatgtactattattattaacaatagtcatcctgttgtgctatcaaatagtatgtcttattcattctttctatttgtgttgagtattgtacccattaaccatccccacctcccccatccatcccgccgacgacccttcccagcctctggtaaccttctgtctatatgttaaaaaaaaaaaaaaaactgctttttttgttttgttttgtttcgagatggagtctcactctgtcgcccaggctggagtgtaatggtgcgatcttggctcactgcaacctctgcctcccaggttcaagtgattctcatgcctcagcctccctagcagctgagattacaggcacgcgccaccacgcctggctaatttttgtattagtagagatggggtttcaccatgtcagccaggctggtctggaactcctgacctcaagtgatccacccgcctcggcctcccagagtgctgggattacaggcgtgagccaacatgcctgtcctcgttcaattgttttgattattttaattcccacaaataaatgagaacatgccgtttgtctttctgtgcctggcttatttcacttaacataatgacctccagttccatccacgtttttgcaaatggcaggatctcattctttttcatggctgaatagtactccattgtgtataagcaccacattttctgtatccattcttctgttgatggacactcaggttgtttccaaatcttcactgtcgtggacagtgctgcaaaaaatatgggagtgcagagatctccttaatctactgatttcctttcttttgggtatatacccagcagtgggatggcaggatcaatttttagcttaatttttagttttgaggaacctccaatttacattcccaccaacagagtatgagggttcccttttctccaccagcatttgttctttgctgtcttttggatataagcttttttttttttttttgagacggagtttcactcttgttgcccaggctggagtgcaatggtgcaatctcggctcactgcaacctccgcctctcaggttcaagcaattctcctgcctcagcctcatgagtagctgggattacaggcatgctccaccacgcctggctaattttttgtatttttggtagagacagcgtttctccatgttggtcaggctggtcgtgaactcccgaccccaggtgatctgcccgcctcagcctcccaaagtgctgggattacaggcgtgagcaattgcatctggccagatataagctattttaactggggtgagatggatatctttatcttattttagttttgaccaccatccctttctgggtcctcacctccccagattcacccccaattgtctaagatccaatcacataatgtttcttatcccacgtggctcatagcagacctccttctgcttaacacggaccaatcctgaacaaccatgactcttcctttataaacatcagttgcactaacatactacttttcaggttttccagtagagagaaaacaagggaagtgtgccctctcatttaggggttttaggaaccagctcttccacagagatttcttttaagtctaattttgtcataaaaaattttgcattcgagccgggcgtggtgactcacacctgtaatcccagcactttgggaggctgaggcgggtggattacctgaggtcaggagttcgagaccagcctggccaacatgacaaaaccccatctctggtaaaaatacaaaaattagccgggtgtgttggcacacaccagtaatcccagctacttgggagactgaggcaggagaatcacttgaacctggcaggtggagattgcagtgagccaagattgcgccactgcactccagcctgggtgacagagtgagactctgtctcaaaaaaaaaaaaaaaaaaaaaattcacattcgactccatgacatgaccattttaatacaaagatgagttttccttccaaagatgaagtaaaattgttgatccaaaatatttgccacgagtttatgaatccttgacacgccattgcatatccctgggcttatgcatgttcccaattgagaagcaagggaagagaatggttcatttatttgatccaccaggatttactgagaagtgtccttgttctaggcttgggtaacgtgctgggcatacttgagtgagggagacaggctctgctttgaggagctcagtccagtggttacgacaggctggctcagtctgtttacaggcagggagagaagccctataattactacgatgtgttccgatcctggtgtggggtgtagaatacagaatatatcaagtgggcttagttttcctggaacatgttttgctagagtttaaagagagaaccgcataaagtcctttggcggccctgagatacctgactgacataattactgtatcagtaacctttttattaattcactcttcaacgtctctgattaattctccataaaggaattcatctgtctggtctcatctgggaaggcttcccgcaggaggtgacatttgagagaaatcttgatggatgcatataataaccacaaataatactattttaaaaagtaataactgctaacttttgcatagggcatactaaaatattctaagccttctatgtgtactaagtcatctaatttttacaacagtccatgagttagatgttttattgattcaatcatttattcattcaacaagtatttattgaatagttcctgtatcttatagtcaggaaaactgaggaccagagaggttaaatcacttacctggggccacacagctagtgagattttttttttttgagatagggtcttgctctgttgcccaggccggaatgcagtggcgcaatcatggctcactgcagcctcaacctcccaggctcaagcaatcttcccacctcagcctcctgagtaaccgagactataggcgcatgccaccacacctagctaacttaatttttttttttttttttttttgtagagacagagtctcactatgttgcccaggctggtctcaaactcctgagctcaagcaatcctcctggctcagtctcccaaagtgctgggattacaggtatgagccattatgcctggccaaatgagttttgttttttttttttggggggacgaactctcgctctgtggcccagcctggagtgcagtggcgcgatcttggctcactgcaacttccgcctcccgggttcactccattctcctgcctcagcctcccgagtagcggggactacaggtgcccgccaccacgcctggctaattttttgtattttttttagtagagacggggtttcaccacgttagccaggacggtctcgatctcctaacctcgtgatccgcccgcctcagcctcccaaagtgctgggattacaggcgtgagccaccgcgcctggccttttttttttttttttttttttttttttttttgagacggagcctcgctctgtcacccaggctggagtgcaatggcgggatctcagctcactgcaacatccgcctcccaggttcaagtgattctcctgcctcagcctcccgagtagctggaattacaggtccccaccattacgcccagctaatttttgtatttttggtagagaggggggtttctccatgttggccaggctgatctcgaactcctgagcttaggtgatctgcccacctcgacctcccaaagtgctgggattacaggcatgagctaccacgcctggccgagatttttacaatttgatttagcttaatttttttccatgaattttctgtttgtatcttttacccatttttattaaaaaatggggtttccttttttgctgaagagtaaaaaagctttacagataaaggaaattagcatattatcacaccacatgtaatagcttagttacttgttttttgttggtggctttttttttttttgagatgcagtctcattctgtcacccaggctacagtgcagtggccgatctcagctcactgcaagctccgcctctcaggttcatgccattctcctgcctcagcctcccaagtagctgggactacaggcgcctgccaccacgcctggctaattttttgtatttttagtagagacggggtttcaccatgttagccaaggtggtctcgatctcctgacctcttgatctgcctgcctcagcctcccaaagtgctgggatcacaggcgtgagccaccgcgcctggacgatggagtttttttttttttttaaataatctatatatatatatttattattattattttatttttgagatggaatctcactttattgcccaggctggagggcagtggtgtgatctcggctcaatgcaacctccgcttcccaggttcaagcgattctcctgcctcagtctcctgagtagatggtattacaggcgtgagccaccacgcctggctattttcttcgtatttttagtagagtcaaggtttcactatgttggccaggctggtcttgaactcctgacctcaagtgatccacttgcctcagcctcccaaagtgctgggattgcaggcgtgacccaccgcgcccggccttggctaagttacttgttggttagagtctaggttctggggatagagcaatgaatgagatggacaaaatcccctgatttccaaaagctgacactgtattgggccgacagagcagggacaaataaataagatatataatatgtcatgtggtgatcaggattggttacggggaaaaataaagcaggaaagacagagaagggccaggactcacgcctgtaatcccgccactttaggaggccaaggcaggaggactacttgagcccaggagtttgagaccagcctgggcaacaaagtgagaccccaggctgcagtgagctatgatgataccactgcactccagcctgggagacagagtgagatcccatctcaaaagaaaaaattaaattaaaaagacagacagagggccgggcatggtggctcacgcctgtaatcccagcactttgagaggccgaggtgggcggatcacgagatcaagagatggagaccatcctggctaacacagtgaaaccccgtctccactaaaaatacaaaaaattagccgggcatggtggcgggcgcctgaagtcccagctactcgggaggctgaggcaggagaatggcgtgaacccgggaggcggagcttgcagtgagccgagatcgcgccactgcactccagcctgggcaacagagcgagactctgtctcaaaaaaaaaaaaaaaaaaagagagagacagagcgagagagacaggcatagagagtgtgtattgggagaggatgttataatttacagtgtgccaagtaaaggtttcatggaggtgacatttggagcaaagacctgaaggaggtgagagagccaccttgtgaacatgtgagggaactgtgttccaagcagaaggaacagtcagtgcggccgggcacggcggctcacgcctgtaatcccagcactttgggaggccaaggcgggtggattgcctgagctcaggagttcaagactagctgggcaacatggtgaaatcctgtctctactaaaatacaaaaaattagccgggcgtggtggcgggcgcttgtagtcccagctactcgggaggctgaggcaggagaatggcttgaacctgggaggcggagcttgcagtgagccgagatcccgccactgcactccagcctgggtgacagagcgagacttcttctcaaaaaaaaaagaaaaaaaaaaagtcagtgcaaaggccctgaggctggagcctgcctggtgtacttgaagaacagcagaaacccgtggtgcctggcagcagagggagcaagggagtgttgagaagaaagcccaagaaaaagcaggccgcgcaagagaggaggtgacagccagatcttacaagacctcaaagctcctggtggggacttgggacttttctctgggtgagatggaacacccaaggtggggaggtttgatgaggtaactgagggcgttataggagtttgccagtcaggaatgatgttggagtaggaggatgtaggtttctgagagttgaaaaggaacaattaatccttcacacagcaaatgtatatatttatacatttaactctggctctgttccaaaccttgtgttaacagtgagcccaatagctattaatacaaatagaatgtaatgccaggaatttagccactcataacttacatgagttatgaacttttttttctttttgagacagggtctctctctgtcacccaggctggagtgcagtggcgtcatcctggctcactgcaatctctgcctcccgggttcaagccattctcctgcctcagcctcccaagtagctgggattacaggagcacaccaccacacccagctaatttttgtatttttagtagagatgggggtctcaacatgttgcccaggctggtcacgaactcctgacctcaggtgatacacttgcctcggcctctcaaagtgctgggattacaggcgtgagccaccacgccctgcctgaggtgtcgtttttgacatttaaatctgcaatctaggctgaggatggtggcgcacgcctgtaatcccagctacttgggaggctgaggcaggagaatcgcctccacccaggaggtggaggttgcagtgagccgagatgatgccactgcactccagcctaagtgacagagtaagactctctctcaaaaaaaattaaaaaaaaaaaaaataaataaataataaatctccaatctacctctaactttatacctttccagatggctattgagtgtcttagttttatggagaaaagtccatctcgttttcaatgatatgaaattccactgttaaaatgtaaattcccagctgggtatggtggctcatgcctgtaatcccagcactttgggaggccaaggcgggtggattgcctgagctcaggagttcaagactagctgggcaacatggtgaaatcctgtctctactaaaatacaaaaaattagccgggcgtggtggcgggcgcttgtagtcccagctactcgggaggctgaggcaggagaatggcttgaacctgggaggcggagcttgcagtgagccgagatcccgccactgcactccagcctgggtgacagagcgagacttcttctcaaaaaaaaaagaaaaaaaaaaagtcagtgcaaaggccctgaggctggagcctgcctggtgtacttgaagaacagcagaaacccgtggtgcctggcagcagagggagcaagggagtgttgagaagaaagcccaagaaaaagcaggccgcgcaagagaggaggtgacagccagatcttacaagacctcaaagctcctggtggggacttgggacttttctctgggtgagatggaacacccaaggtggggaggtttgatgaggtaactgagggcgttataggagtttgccagtcaggaatgatgttggagtaggaggatgtaggtttctgagagttgaaaaggaacaattaatccttcacacagcaaatgtatatatttatacatttaactctggctctgttccaaaccttgtgttaacagtgagcccaatagctattaatacaaatagaatgtaatgccaggaatttagccactcataacttacatgagttatgaacttttttttctttttgagacagggtctctctctgtcacccaggctggagtgcagtggcgtcatcctggctcactgcaatctctgcctcccgggttcaagccattctcctgcctcagcctcccaagtagctgggattacaggagcacaccaccacacccagctaatttttgtatttttagtagagatgggggtctcaacatgttgcccaggctggtcacgaactcctgacctcaggtgatacacttgcctcggcctctcaaagtgctgggattacaggcgtgagccaccacgccctgcctgaggtgtcgtttttgacatttaaatctgcaatctaggctggggatggtggcgcacgcctgtaatcccagctacttgggaggctgaggcaggagaatcgcctccacccaggaggtggaggttgcagtgagccgagatgatgccactgcactccagcctaagtgacagagtaagactctctctcaaaaaaaattaaaaaataaataaataaataaataataaatctccaatctacctctaactttatacctttccagatggctattgagtgtcttagttttatggagaaaagtccatctcgttttcaatgatatgaaattccactgttaagatgtaaattcccagctgggtatggtggctcatgcctgtaatcccagcactttgggaggccaaggtgggcggatcacgaggtcaggagatcgagaccaccctggctaacacagtgaaaccccatctctactaaaaatacataaaattagccaggtgtggtggcgtgtgcctgtaatcccagctactcgggaggctgaggcaggagaatagcttgaatccgggaggcagaggtttcagtgacccaagatcgcgccactgcactccagcctgggtgacaaaccgagactccatctcagataaaaaaaaaaaaaaaagatgtaaattcccatatgtatttctggcccctctaatctgtcccttttaaccagttgtctgtccttttatgggccagtcccaaactgtttgaaaactatacttttatgatcagttttcaaatgcagaagggctgatttcctcttacattttcagaaatgttctgcatcttttcacatttttttcttttgaacctcagaatcaacctgcctaactttaaaagagccttttagtgttttaaataaggctagattaaattcatagactcggggggaaaccaggttcaactttttaatactggatcttcccaaatattcaaatcttgtatgctcagccctagcagcagtttcaagttttttgaactagatcctgtgccatttttgataagctcattccaagatatttttattatcttttaattcttgcttgagtaaatgcaatgttcttttcttctgcttgttttctaagccagttttctgtatactggcacttgtttaggttgaagatattaattttgcaaccctagagcccccttgctcaattctcatttcttccaatagtttatgggttctctttcaagatatacagtcacattgaggcaggagaatagggcctggaggcagggaacctaaggctgattcaccctgacttctagaactacatcgaaagaaaaacctcaaccttccacgcttaagtaacgaaaggaccaggggagactcctgcaaaccccaaccttttctgtggggcagatgggaaatcgaaggtacccctgattggttgcagaaagcatagaagtgtaacttcctaacttcacttcagcctctgattggttgctgtccacaaccactgtccacaaccaatcagactgattgcaggcgaggtctttgtttgcatagaagtgcaactttgtaacttcactttagcctctgattggtcgctttttgcttgcagaccaccacttcatttacatggggtgaacaccaagtggccaatgggagggccaggtgcagtggctcacacctgtaatcccagcactttaggaggccaaggccagcagatcacctgaggtcaggagtttgagaccagtctggccaacatggtgaaaccccgtctctactaaaaaatatacaaaaattagccaggcatggtgacagacacctgtaatcccagctactcaggaggctgaggcaggagaatctcttgaacccaggatgcggaggttgcagtgagccaagatcgcaccattgcactccagcctgggtgacaagagtgagactccatctcaaaataaataaataaataaaaataagtgaccaatgggaaacctataggaggtatttggacctaagaagatcctgtatccggggcccttgagcagctgctggggcctgctcccacactgtggtgtgtactttcacttttgataaatctctgctttccttgctttgctgtgcgttttgtccaattctttgttcaaaacaccaagaacctagacaacttgcagtcaagaccctctatcggtaacaacatcatctctgaagaatagacatgcttccttctttctaaggttcatactcttcttccttttccctatataattacatgagtcatgttccttgaatctgagcccagcactcaaggtttttgcttcctggcacagggcctggggcctctgtccatccttgaaattctttgcctatcattttctgctccaaaacggttatacccaaaggtgctttaccatgacttctcaggcacggaggcatcactccattgggagccatttcggcaggaagcttctctgactgtcccaagtcctcattccaataaacataaaaacaacaatcatattataggcattgacatgcattctgaagaaccttatattttgctcaatagcatgtttgttttttgttgttcttttgttttttttttttttttttgagacgaagtctcgctctgtcgcccaggctggaatgcagtggcaagatctcggctcactgcaagctccgcctcctgggttctggccattctcctgcctcagcctcccaaatagctgagactacaggcacccaccaccatgcccagctaattttttgtatttttagtagagacagggtttcactgtgttagccaggatggtctcaatctcctgacctcgtgatctgcccacctcggcctcccaaagtgctgggattacaggtgagagccaccgcgcccagcctgttttttgtttttgagacggagcctcgctctattgcacaggctggagtgcagcggcgtgatctcagctcactgcaacctctgcctcccaggttcaagcgattcttctgcctcagcctccccagtagctgggattacaggtgtgtgccaccacacctggctaatttttgtatttgtagtagacacggggtttcaccatgctggccaggctggtctcaaaactcttgacctcaagtaatctgcccacttcggcctcccaaaatactgggattacaggcgtgagccactgtgcctggtcagtagcatgttagaattaaatgagccttttgggaaaattcaggtgagggtaggttacccaaagactatgcagccacgttcaaacctttggtggtttatgtatttatttagagacagggtctcactcctgtcacccaggctggagtgctgtggcatgatcatggctcagtgcagcctcgacctcctaggcttgggtgattctcgtggccacctcagccttgtgagtggctgggactacagagacacaccacctcacccagctaatttttttttttgtatatttgtatttttagtagagacagggttttgccatgtcgcccaggctgatctcaaactccttggctcaagcgatcttcctgcctcagccttccaaagtgttgggattacaggcatgaaccaccacactcagccctttggtgttttttttgtttgtttgtttgtttgagatggagtctcgctctgtcacccaggctggagtgcagtggcgccatctccggctcactgcaagctccacctcccgggttcacaccattctcctgcctcagcctcccgagtagctgggactacaggtgcccgccaccacgcccggctaattttttttttgtagttttagtagagacggagtttcaccgtgttagcggggatggtctcaatctcctgacctcatgatctgcccacctcggcctcccaaagtgctgggattacaggcgtgagccacctctcctggtccttaatttttaaagtttttgtagagacggggtcccaccatgttgccccagctggtcttgaactcctgggctcaagtgatcctcctgccttggcctcccaaagtgctggaattacaaagtgctggtgacgtgaaccaccttgcccagctgtgtacactctaaatggttcattttatattatttctaaatggttcattttatattatgtgaatttcacctcaatacaaaacttttttttttttcagacggagtttccctcttgttgcccaggctggggtgcaatggcacgatctcggctcactgcaacctacgccaccccaggttcaagcgattctcctgcctcagcctcccgagtagctgggattacaggcacgcaccaccatgcccggctaattttgtgtttttagtagagatggggtttcaccatgttggtcatgctggtctcaaactcccgaccccaggtgatccacctgtctcagcctcccaaagtgctgggattacaggcgtgagccaccgcgcccggcttttttgttgttgttgttttttgttttttttaattgactcagctttgggcttgaactgttagaatgatggtgcgtccattcagtgagatgaggaagctctagggaaaatgaacttgggagtggggaatcccattttgaatgtcttaaatttgatatgccttgtaggcttccaagccgagttagatatatgagcctggagttcagagatggggtggagataaaaatttagaagccattggcacacgggaaatatcttaagccatggagctagatgagctcatttaggccagaggtgtccaatcttttggcttccctgggccacactggaagaagaattgtcttgggcaacacataaaatacgctaacactaacaatagctgatgagctaaaaaaaaaaaaaaatcgcaaaaaaaaaaaatctcattttttgttgttgttgttgttttttgttttcgagacggagtttcgctcttgttgcccaggctggagtgcaatggcccagtctcggctcactgcaacctccacctctgggttcaagtgattctccttcctcagcctcccaagtagctgggattataggcatgcaccaccacacccggctaattttgtatttttagtagaaacagggtttctccatgttggtcaggctggtctcgaactcccgacctcaggtgatccgctcgcctcagcctccgaaagtgctgggattataggcgttgccaccgcacccggccaaaatctcataatgttctaagaaagtttacgaatttgtgttgggccaccttcagagccatcctgggccgcatgcagcccacgggccgcaagttggagaagcttgatctagggaaagggtgtggggaaagacgaagagatggcccaagcccatgcctctggcagtcccagcgtgtcagtgtcagacagcagacaaagaatccaggagacagcagaagagggctggggggaagcccaagagtgagtgtttggaaaactaaagagagtaacagcaatcggttggaattggagtgtatccatttatagaggactatgcttagtggtacacaaacataaattgtggcgcatccgtgtagtagaatactatgcatggttacacgaaataaggaggaagttctctatgtgctgagatgggaagatttcctttgtatgaaatgatttgctgacatcctcacaaaacactgtttaataaagcaaggtgtataacactgtaaaaaaaaataaagagagagagaaaaattccttttttttttttccttttcgagacagggtctcactctgtcacccaggctggagtgcagtggtgcaatcatggctcactgcagcctcccaggctccagcgatcctcctgcctcagcctcccaagtagctggaattacaggcacccgccaccacgcccggttaatttttgtatttttagtagagacaggttttcaccatattagccaggctggatctcgaactcctggcctcaagtgatccacccgcctcggcctcccaaagtgctgggattacaggcgtcagccaccgtgcctggccacaggactggctttcaatatgaagcacagaaacgtcctccaaggggcaggagagaaggacaagggcacacacgtccagcaaatgcagatttcctggtaagaagctgaagaaacaaattttattatttaacaaaaatgtagatgatgcttactatatgcctgaccctgttccaagcactttgcaaatacttcatttgcatgaaaagcctttgaggtagctactgttatattctgtcatcctcatcttacaaatgaggaagcaggcacagagggcaatcaccttccccaaagtcacacagctggtaagaagcagggctgcttaaaggtgggcaatcgggcagcagaattcacactcttaaacagtactccataatacttctctgtgcttgacctcctggggctcaagcaatcctcctgggctcaagcgatcctcctgccccagcctcccaagcagctgggatcacaggcttgcactaccatgcctggctaatttttttgtatttttagtagagatgggctttcaccatgttgtccaggctggtctcaaactcctggcctccagagatcctccagcctcagcctcccgaagtgctgggattacaggcgtaagccacagtacccagtcctctgtgctctgttcttgataaatgacattttattgtacagatgtgttttatttttagatggaagatcagtgggtgaagattcaggctggttcagggcactgggagtcttgaggagagaggagactcagaagctgccgtcttggagaaaaaaacttactagaaaaacaggaggactccatgtttgaggtttgtggtgctgggttttcagtgaaatcccagaggctggctgagatttttcctgcttcgtgggaggaaatggctttcgcatgggagggggaaagataagtatggcccagttcacagtctgtctgcaaatccccaggcactctggttccccggttctctcggggtcctggaatctggtgctgggtggcctgtctgcccttccaactggccacctggtccctgtgagctgaactccaggaacccagcatggccaggccaggctgcaggggagggaagggcctggaagcctgttcccaggccatggccaaaggaaacgagttaccttccaggaactggagcccagaggcaggggtgaggagctggggagctgggggcctggagggaaagcagtgcccagaacttgcagggcctctgaagctgggctggagtttggctctgggcacgagagccaacagggcctgtcatgggcacagtctccaccccatgatttgagggctgaataatggtcctcaaatacaaccacctcctaagtcctggaacctgtaaataggtgacttcatgtagcaaaagggacttggaagatgatcctgaattatctgggtgggaccaatgtcattacaaaggtctttataaagaaggccaagctcagtggctcacacctataatgccaacattttgggaggccaaggcaggaggatggcttgagctcaggagttcaagaccagcctgggcaacatagtgaaaccccatctctactaaaaatacaaaaattagccaggtgtggtggcaagtgcctacagtaccagctactcaggaggctgaggcaggagaatcgcctgaacccgggaggcggagattgcagtatgccaagattgccctgggcgacagagcaagactctgtctaaataaataaataaataaataaataaataaataaaatttaaaaagaaaagagggagacgagagggtcagaatcggaaaagggaacgtgccaatggaagcagggtttggagtcatgcaagaaacggccccaagccaaggaatgcaggtggcccctgtactctgggaaaggtgaggacacgtactcttccctggagcctccaaaggaacacggccctgctcatccattcagacttgtaaccttccgaactggcagccaataaattttgtgttgccttaagttaatccatttatggtaatttgttacagtgacagaagcttgagacagcaagtttctttttttcttttttttttttttttgagacagagtcttgctctgtcaccaggctggagtgcagtggggtgatgtcggctcactggaacctctgcctcctgggttcaagcgattctcctgcctcagcctcccaagtagctgggactacaggcacccaccaccatgcccggctaattttttatattttagtagagatggggtttcaccatgttggtcaggctggtctcaaactcctgatctcaggtgatccgcccacctcagcctctcaaagtgctgggattacaggcacgagccaccaagcccggcccgagacagcaagtttctttatctcctggggactctgtttctgaaactgtgaatcagtgataactgaatccctgcagcgttgtactgaggctattggacacagatacatcaagtgtttaggatggttgctggcactcagcaagtgcttgacaatattagctatcattatcttcaaagtgttaccaaaacaccaggggtttggtctaggtcatgctgctcacagcacagaaagccaataagggaagaaggctttaattgggcgctgccgctgaggagatggttcaatctcaaatccatctccttgaccagctaaaatcaggggtttaaataacagggaagaaatgtaacaatgtgtaagaaaacaggaactagggaggggcaaggaagcagtcatgatgaatgagaggtccattatctcattgtctggatgtgatgatctggtaagtttcagttatttgatactttttgtttttgagatgcctgaaagtgaaaggaactcagataaaacaaattaagtctcaagcttaaagaccagaagggtcagtttcctatgtttatccaaaaaactatctatgggactattgggtcagtttcaaaagtgtaggcaaagtattcatttgtccaacaaatatttatcgagcatttattatgttccaggcactattactgctggagattcagcatgaaccagacagataaacacttcctgcctcggccctgagccctcaggaaactttcaatctagggagggagaaagacaataaacaaaagaaatgggagaatggcgtgaacccggcagacggaatttgcagtgagccgagatcgcgccactgcactccagcctgggcaacagagcgagactctgtctgaaaaaaaaaaaagaaaagaaaaagaaatgtgtccttttagttttttgtggttattttttgccatacaaaaggtattaattcttatgaagtcatatgtagctatattttcttttctgttctagttttggtactcgtcttacaagaccttcttctctccaagaaaagcaaatgtgaagcacatcaaggtcttttttttttttttttttgagactgagtctcactctgtcgcccaggctgatgtacagtggcacaatctcggctcactgcaacctctgcctcccagttcaagcgattctcctgcctcagtctcccaagtagctgagattacaggcacctgccaccacacccaactaattttttgtatttttagtagagatggggtttcaccatgttgaccaggctggtcttgaactcctgaccttaagtgatccacctgccttggcctcccaaagtgctgggattataggcattagccaccgtgcctggcccaaagtcttaatagttataattgcttttgtttaaacttatatatatgtgtatacatacactcatacatatatacacacatatacacaaacatatatacattcatatatcacacatgcacaaatacatacaacatactcatatacatatgtatatatccacccatatatacacataaatgcacttatatatgcacatatacatatgtacataaatatacatagacacagaaaagcaaacatatacataaatttacacacatatatacacaaacatacacttagacacagaattatagacatacacacaaattcatgcccacacccatagacacacatatacatatatacacgcatgtatatgtccgtatagagagctctatgctggaatatacaaaaacattttttctcttttgaaggaaaacgagaacctgctatggcttttgtgggaggttggggagaagcagacggggcactctccgtttctaattttgtacagctggaatgtctaacactctgcatatcttattttaaaatgtctatgtgggctgttttagcaacaggatgataggtcagttcttgttttcatctttatatggctctttattcaataaaaacaaaaccactgccacctaaaaataaaatgctttaggagccaagaccacgttataggttacagtcacagtcattcttttttttctttatttttctttttctctgggtctggtataaagctttcatttaacctgatttactcttgccaatctgtcgctgaataagccattcatagccctgccgatccaggcctgggcatgtcctggtatgtcagattgtccaagccagcagctgccacggttcccattcctcaggcttcaagaaatgacaggagcatctgccaagggttcatccggccatggtgacctgagagctttataacaacaagtgattgtctaatgaatttgaacacaagggtttgctgttctaggtggcttcacagtgctacgttcagggtatttcccatgtgattttcttaattgtgataagaaataagagttgtgcaattccgctcagaaatataaaaaaattcctccaccaggacactttgaatccttctggatctatgtaaccaggattagaacaggcagctgtctaaccgccattactaggtccctcaagctatgacactgctggaaagaaagggagactaactgattgaacaacctaccaaatccaaaaaagaaatacaataattgagactggacaaagtagctcacgcctgtaatcctaacactttagaaggctgagatgagtggattgcctgagctcaggagtttcagaccaggctgggcaaaatggtgagacccctgtctctactgaaaaaatcccccccaaaaaaaaaaattggctgggcatggtgtcacacgcttgtggtcccagttacttgggaggctgaggtgggaagattgcttgagcctgggaggtggaggttgcagtgagccgagatcatgccacagcactccaacctgggttacaatgtgagaccttgtctcaaaaacaaaacaaacaaacaaacttcaaatgcatgaaactcgtccttcatagcttctgagatatgtctttctgcttagaaaagtactctccctgcttctaagagtatagattacttcaccatttgcagggaggcatttgatgtcttcatgctttgcatttacatctttcatccagctggaatttttctcagtgaaagtaacattggaatagtccatcacgctccaaagaaatgtttggccacttgatccttgtctcatctgctggcctgtaatgctgccttcatcaaaactgaaaatctcacatttagggacgccaaactgtcagaaatattatagattcataatgcattttagcgcctgatagggcatactcctgccccactgtgcatttcagagtttctgggttgctttcatatggtaacaatttttcagcagctcatcttgcatttatatgttaaactccagaagctggacaaagacgaggcgggatgctttacttttacagttaaatgactgggctaggtgcggcggctcacacctgtaatcccagcactttgggaggccgaggagggcagatcacctgaggtcaggagttcgagaccaacctggacaacacagaaaccccgtctccactaaaaatacaaaaaaggcgcggtggctcacgcctgtaatcccagcactttgggaggccgaggcgggcggatcacgaggtcgggagatcgaggccatcccggctaaaacggtgaaaccccgtctctactaaaaatacaaaaaaattagccgggcgtagtggcgggcgcctgtagtcccagctacttgggaggctgaggcaggagaatggcgtgaacccgggaggcggagcttgcagtgagccgagatcccgccactgcactccagcctgggcgacagagcgagactccgtctcaaaaaaaaaaaaaaaaaaaaaaaaaaaaaaaaaaaaaaaaaaaaaaaaaaattagctgggcatggtagcacatgcctgtaatcccagctactcgggaggctgaggcacgagaatcacttgaacccaggaggcggaggttgcagtgagccgagatcgtgcctctgcactctagcctaagtgacagtgagactctgtctcaaaaaataataaaataaaataaaataactaacactatcaataattgttcacattcacccagcactcatccgccatagcacaagaccacagccttacttcttacacattcgcttattttttgttgtgtttttttgtttgtttgtttggtttttttgagactgggtctcattctgtcacccaggctggaatgcagtggtgtgtctctgctcactgcaacctccgcctcctgggttcaagtgattctcctgcctcagcctcccgagtagctgggattacaggcacacgccaccacacccagctaatttttgtattttttgtagagatggggtttcaccatgttggccaggctggtctccaactcctgacctcaggtggtccacccgcttcagcctccaaaagtgctgggattataggtgtgagccactgtgcccggccacattcacttgtttttctagaactattatgcagggattggagcttttccaaagcagccatgcctgaggtttacttgtcattggacttgagcatgacaaggcatgcactttgcagacatcgaaggtagagtttttcagtggcaggcatgcccatgccagaaaaaatttcaaacgaaccaggacaggcagcgacccaccttccaaaacaaggatgctttgtataacgtgcaaatatttgtccagaaatggcaagaaatgcttctaagaactgcagaaaaatccagttaatttagcaatataggtgaatgtagtttggggtaatgtaactttttaaattttttgtttaagtataatgttgttttaatgtaaggaagtataaagaaaataaatgacccactatctgtcctgtccacatcagcattctaaaatataatgtgttaccaagcgtgagagttacagatggggacataatgaagtccttccctccattcccctcagttccccacctcagaagcaacccgttttccatttgttgtttttccttccagaaaaaaggaaaaagattgatacatatactaccatatataataatataatgtttttcatttataaaagggtcatcatatgtgcttgttacttatcacttcataaaatccctctccctctccctctccctctccctctctcgacacggtctccctctgttaccctgtctggagggcagtggactgatcatatcttactgcagcttcaaactcctgggctcaagcaattctcccatttcagccccctaagcagctggaaatacaggtatgtgcttggcctaaatccctatcccttccccttccccttctttccttcctttctttcttttttttttttttttcttttttgagacggagtgttgctgtgtcgcccaggctggagtgcagtggcgcgatctcggctcactgcaagctccgcctcccgggttcacgccattctcctgcctcagcctcccgagtagctgggactacaggcgcccgccaccgcgcccagctagttttttgtattttagtacagacagggtttcaccgtgttagccaggatggtctcgatctcctcacctcgtgatccacccgcctcggcctcccaaagtgctgggattacaggcgtgaaccaccgcgcccggccctttttttctttctccctttctctgtttctccttctttcttcttttattcttccctctctctttcttgcctttttttttttttttgagacggagtcttgctcttttgcccaggctggactgtagtggcgctatctcggctcactgtaagctccgcctcccgggttcacaccattctcctgcctcagcctcccgagtagctgggactacaggcgcctgccaccacgcccggctaattttttttgtatttttagtggagacgggatttcaccgtgttagccaggatggtcttgatctcctgacctcgtgatccacccgcctcggcctcccaaagtgctgggattacaggcatgagccaccgtgcccggcctcttccctctctctttctctctctgtcctcccttcccttcctccccgcctccctccttccttccttgtttctttcctttttttttttttttttttttttttttgacagagtctcattctgttcccaaggcagtggtgtgaacatggctcactacagcctcaacctccctgggctcaagcaatcctcccacctcagcctcccgagtagctgggactacaggtgtgcaccaccacacccagctaatttttattttttgtagagacaggatctcagtatgttgctcaggctggtcttgagcgcctgggctcaagtgatccacctgcctcagcgtcccaaagagctggaattacaggtgtgggtgacagagtgagaccctgtctctcaaacaaaacgaaaaccaaccaaacaccccaccaagcatgaaataaggatgtacatatagatgaatgcaatagagttgacagtctagaaaaccatcatgtgatactattttccgcatggctggcaaaagctctaagctttgtctaaaatcccgttccaggccaggcgcggtggctcatgcctgtaatcccagcaccttgggaggctgaggcgggaggatcacgaggtcagcatattgagaccatcctggctaacatggtgaaaccccatctctactaaaaatacaaaaaattagcctggcatggtggtgggcacctgtagtcccagctactcgggaggctgaggcaggagaatggcgtgaacccgggaggcggggctggcagtgagctaagatcgcaccactgcactccagcctgggcgacagagcgagactccatctcaaaaaaaaaaaaaaaaaaaagaaaaggaaagaaaagtgcttggcacactgtattatataaacctttgtgagattaaataagtaagcaatttttcagttttttatcttttttttttcctgtggattccctattgagattcattgccaggttattctgtatttctttttttgatacgtgcaagctctttgtgattcaaggaaattatcttgagtccatccttgtggtaaatgtgtccccgggtttgttgtttgtcttttgacttgtggattttttttttctgtctgaggatttaaatgtttatatagtcaggttgattaatcttttcctttatgacttctgggcttggctgggtgcagtggctcacgcctgtaatccaagcgctttaggaggctgaggtgggcggactgcctgagcccagcagttcgagatcagcctgggcaacacggcaagccctcgtctctataaaagacacaaaacagccatgcgtggtggcacatgcctgtagtcccagctacttggaaagctgacgtgggagaatcgcttgagcccaggagttcgagaccagcctggacaacatagggagaccccatctctacacaagatcaaaaagtcagccgggcacagtggctcacgcctgtaatcccagcactttgggaggccgaggcgggcagatcacctgaggtcgggaatttgagaccagcctgatcaacatggagaaaccccgtctgtactaaaaatacaaaaattagctgggcatggtggtacatgcctgtaatcccagctacttgggaggctgaggcaggagaattgcttgaacccaggagacagaggttgtagtgagccgagatcgggccattgcactccagcctgggcaacaagagtgaaactccatcccccactccaacaaaaaaaaaaagttaactcagtatggttgtgtgtgcctgtactcccagctactagggaggctgaggtaggaggatcacttgagtccaggaggtagaggctgcagtgagccacgatcacgccactgcactccagcctgggcaacacagcaagaccccgtctccaaaatacaaaaattcttctgcttccaaaattataagtaaactcattcctatttttacctaaatgtttattaatttcatttttcacatttacatctttgattcatctggaaggtatctgaggactcaaagaaggagctagggaaaccaactttattctttttgttttgtccaaatagctagccagttttcagagcattagctaagtttagaaaatctcttttctctcctgccgatttagaataaatagcaccatggctggtcatagtctaagttctcagatgtatgaagctctatttctgggttcatgattctgtcccaccattttgttggcctagttcctcaacacaagtaaactacagtgacatcgtatcctcacaatccattccttgatatatcagtgggactaatccgacgacatgaattttcattttccgggatattctggccattaacagagggtagtcggtttttattttttattttgtttgtttgtttgtttgagacagggtctcattctgtcgcctagagtgtcgtggcaggatcatagctgactgtaaccttgaactcctggcctcaagggagcctcccaacttagactccctagtagctgggattacaggtgcatgccaccatgattttaaatgcagtaatttgctttataatgtcaggacgtggtttggtgaaaccaacccagatgcttgtaagtcaaggatgaaaaacttgggtcacccggcatcactaacattccctaagagctgaacgctttcccctcataaatgtcagggtcacgggaagcaacaggaaaaccttctccaatgactcctctggggtggcttgttgcgccctccctccggaccacgcagcccctaaaggtcagtcccagaccttgagctcagtgtaatatctagattcatgctagagacatgaatcaaaggttcaattttatgagaacgaatgtgtagggcctgaattttaaacacggagccatgttaggctgcaaacagtcttaaaccacagcatgctgatcagaaatgtgaatgagacacacagggagggcaggggcaagtttattacaagatctataatcacacacaagatgcgttaaactgggcccatcagtggctggctttggtgtgcagcattgctatagctttggctgtttattcagtgcacaggattgtaaagatgaaaataaaatagccactccattgctttttatttattattatttttaactaattaattattttgagacggagtttcactcttggcacccaggctggagtgcaatggcgctatctcggctcactgcaacctccgcctcccaggtttaaacaattttcctgcctcagcctcctgagtagctagcattacaggtgtgtgccaccacgcctggctaattttctatttttagtagagacagggtttcaccatgttggccaggctggtcttgaactcctgacctcaggtgatctgcccgccttggtctcccaaagtgctgggactacaggcgtgagccaccatgtccggccattttattatttttttttaaatagagatgggggtctcgccgtgttgaccaggctggtcctgaactcctgggctcaagcgatcctcccacctagacctccataagtgctgggattacaggcatgaaccactacacctggcccagttactttttaaaaatagtttccattcaagtataatttgcatgtggtgaaatgcacacatttaaagtatatgtacaatttgatgatttttgacagaaattcattttaacacctgtgcaaccaccaacccagacacagaaccttccaccactccaaaaagttccttctcaaagtccttctccttactgagacacccactgttgtaatttttgccatcatagattagtttttcctattctagaacttcttaaaaatgaaatcatatagtacgtgggcatcttttacttctggcttccccttagcataaagcctttgagatccatcgatattttttttttttggagcttaatttgtggcatatattcctaatcccaatgatcaataatgtttgtatatcattatattagtatacagattcagtggtggctatttcatgtggtctctgaattatgcctttatatagtgtaggctctgtcctatttggcttggtaaacttacctagattaaacaagaggtgttaattgcacacagaggcctccttgttgtatggttagtacatctagaattatgtggtggtgagcactgctaaaaccagagaattagcttctgtctggagcttatgtaaggaatctagagttgtatatttggactggactctattagtctggaactcttttgctgcctacgtttttttgagatggagtctccctctatcacccagtacaatggcgcgatcccagctcactgcaacctccgcctcctgggttcaagcgattctcctgcctcagcctccccagtagctgggattacatgcacccaccatcatgcccggataatttttgtattttttgtagagatggggtttcaccatgttggccaggctggtctcaaactcctgacctcagatgatccacccaccttgacctcccaaagtgctgggattacaggcatgagccacggtgcgcagccccatcgatattattctatcagtcctgcagtcctgtttattgttgggtaaggttccactgaagggttgtactgatgcaggataggcaagcccccaaattgaggcttagtctaggagggttcttggcttcacccttgaaataattcaaggtcaagctggtggtgatagcaacttttcttgaggccgcagtgcacagccgcagcagagagactgctccttgcaaagcggggctaccccataggcagtgtgcctagaggagcagctcagaagcagtgctgctgtcatatttatacccacttttaattatatgcaaattaaggggtggtttatgcagaaatttccaggaaaaagctggcaacttcagggttgtcaagggcattgccatggaaaggggcagtaacttccaggtgttaccatggcaacggtaaactggcatggtacagtggtggccatgtcttctagaaagctgcttccaccccagacctgttttagctaggtctcaatttggtccagtgtctaagccctacctctagagttgagctccacctcctaccgcagtaccactcctagctatatacaagagaaatctatgcccacacaaaaactggtacaccaatgttcatggtggtattattcaaaatagtcaaaaagtggaggcaacccaaacgtccatcaaccaatgaatggataaataaaatgtggtacaacatttgggctgtttccagatttaggctattatgaataagtatgctattatgcacatttgtgtacacatctttggtggatatatattttcatttatcttaggtaaatacttaggagtggaatgtctgggtcatatcataagggtatgtctaactttttttttttttgagacagagtctcgctttgtcactcaggctcaagtgcagtggcgtgatcgcagctcaccacaacctccacctcccaggttccagcgattctccagcctcagcctgccaagtaacggggattacaggagcccgccaccatgcccagctaattttcgtatttttagtagagacggggtttcaccatgttggccaggctgctctcgaactcctgtcctcaagtgatcctcccgcctcagcctcccaaagtgctgggattacaggtgtgagccactgagcccagccagggtatgtctaactttttaataaatttccaaacagttctccaaagtggttgtactatctctggttactttaaaataaatgaatataagtatttattgtttgtggttgaaatattcaaagacacaagatgaaaagtgggactctgctgggtgtggtggtgcatgcctgttatctcagcactttggaaggctgaggcagcaggacagcttgaggccaggacaagcctgggcaacatagggagctgtctctattaaaaaaaaaaaaagtaaaacaattagctgggcaaggtggtgtgctcttggggtcacagctactcaggaggctgaggcaggaggattgcttaaacccaggaggtggaggctgcagtgagccgtgatcatgccactgtactcaagcctgggcaacagagtgaaatcctgtcttttaaaaattaaaattggccgggcgtagtggctcacgcctgtaatcccagcactttgcatgtctgtaatcccagctactcaggaggctgaggcaggaggatggcttgagcccaggaggcagaggttgtagtgagctgaaattgcaccactgtactccagcctggacaacagagcgagacacagtctcaaaaaaaaaaaaaaaaaaaaaaggagagtcacagaagaaacaccaaatcttaccctgggcactgggatgatgcctcatgtcatgttgccaagctgagacctgccacgcattctcttgctattatgtggccattcaggcctgaacaagagccaggacccaaggggtttgcaagagtcatgcctgagtttaattaagtgggacagatgtgctatttagaaccaggacacctgggagcaagtttaaaggcttggatgtgccctgcctgtgatgaactttagcacagaccagcacagttccctaatcctcttaattgttcataccattacaaaaagtgcaaatctaaaacagagatgaacagaaaaaaattattgcattatcgttaatctgaccacagtggctaatgttgcttgaataatgcatttgggtgcttttaaaagtctgcagtcagcctgggcaacatggcaaaaccctgtttctaccaaaaaatacaaaaatagctgggcatggtggtttgcacctgtagtcccagctacttgcagaggggctgatataagaggatggcttgagcctggaaagtcaaggctgccatgagccaagatcacgccactgcacttgagcctgggtgaagagcaagaccctgtctcaaaaaaaaattaaataaataaaatttaaaaagtctgtgatgttttattttttaatgtggggaaaatattaaaaagtaaattggccgggtgcggtggctcatgcctgtaatcttagcactttgggaggctgaggcgggcagatcacgaggtcaggagatcaagaccatcctggctaacacagtgaaaccccatctctactaaaaatacaaaaaaaaaaaaaaaattagccgggcatggtgacgggtgcctgtagtcccagctactcgggaggctgagacaggagaatggtgtgaacccaggaggcagagcttgcagtgagctgagatcgcaccactgcagtccagcctgggcaacagagcgagactccatctcaaaaaacaaacaaacaaaaaaagtaatttaaaaatatgtaggtcgtggtggggcacagtgtctcatgcctgtaatcccagcacttcaaaagactgaggcaggaggattgtttgaggccaggcattcaagaccagcctgggcaacatagtgagacctcatctctaccaaaaaaaaaaagttagctgggcatggtggtgcgcatctgcagtcctagctactcaggaagatcatttaagcccaggagtttgaggctgcagtgagctgtgaccacacaattgcactccagcctacatgatggagcaagagcctgactcttaaaaaaattttgtttttaaataattgaaaatactactcaaacacacatgaatctcaaaaacacgatgctggccgggcacggtggctcacacctgtaatcacagcactttgggaggctgaggcgggtggatcacgtgaggccaggagttcgagaacagcctgggcaacatgatgaaaccccgtctctatgaaagatacaaaaattagccgggcgtggtggtgcacacctgtagtcccagctacttgggaggctgaggcaggagaatcgcttgaacctggcaggcggaggttgcagtgagccaagactgtgccactgcactccagcctgagcaacagagtgagatgctgtctcaaaaaaaaaaaaaaaaaaaaaggccggggcgtggtggctcacgcctgtaatcccagcactttgggaggctgaggtgggcgggtcacctgaggtcaggagtttgagaccagcctggccaacatggagaaactctgtctctactaaaactacaaaattagccaggcgtggtggtgggcacctgtaatcccagctactcgggaggctgaggcaggagaatcacttgaacccgggaggcggaggttgcagtgagccgagatggcgccattgcactccagcctgggcaaaaagagtgaaactccctaaaaaacaaaaacaaaaacaaaacaaacaaaaacactatgctgaggaaaagaagccagacaccaaaaaaaccatatgctgtatgactccacttacagcactcctgggacagacacactgagctttggctggaaaaatcattacagtgctcacctctgagagctgcggcggggaccgactgggaaggggcacagggaggctttctaggatgatgatattgttctgtaacttgtcgcaggggtgggttacacaggtgcctgcctatgtccaaacttatccttatcagaccgttcacttaagatctgtccatttcactgtatataaatgttttattttaactaaaaaatgaaaatgtaaaaaaaaggaataaatgaataagtaaatcaacacaacccacttctttctccttggcagctctgctaaccagatccccaaatgggcagctttttcttgggcctcctgggtccagctactgtcacctccccactaggctcccagctgccacctcaccctctgcagtctgttccccaccaggcttccagggggagcctggaaacaacctatgtaggatcctgacgctgtgttcagcaccctcccatggctcccatctctcagattaaagctggaatccatcctggccgcacctgtggggctttgcacaccagcctccaaagccccctgccctcttgctcctcacctcctccttgcttttttatttttatttttttgagacagagtcttgctctgtcgcccaggctggagtgcagtggtgcgatctcagctcactgcagtctcaacctcctgggttcaagcaattctcctgcctcagcctcccaagtagctgggaccacaggcacgcgccatcacacctggctaatttttttgtatttttagtagagatggggtttcaccatgttggccaggctggtcttgaactcctgacctcaggtgatctgcccgccttggcctcccaaagtgctgggattacaggtgtgagccactgcgcccagccttactcactttctgaaacagattagagcctccctccacgatgactgttccctctgcccaggaggccgttcttggccaactgcttgtctcacccctcacccccttcaggtctgttcagacatccagttcccagagaggctcccccaaccattgtaagcgacagccagccgtttctgcacactcaccttgcctgcctatcttcctgttatatttttcacggcagagctccccacccctccacctgtgtctatataaggtctgtcctcactcaaacgtcaggctccaggaagccaggactctgtcttgctcctggctgtcgtacagcagattctcaacgaaccttgcttgaatggcagcatgggcaaccaggacactttgccctcgagccctgctggtggcatccacagctctccatcttcctgcaaacactccgggccagcgcctccccagacgcacccctgaacagaacacctccacccggggcgatgaggtttctttgaagagagctttcatgtgccccaaccttggattccccccatttttagggcacgtaggcctttcatactttactgacagcctgggtgtaaccagtaggagtgactattattgtgggaggtacttaaacatcttggtcaaatagggcttttcccattgtgggggtgtgggggcacccaataaatagagcttcatccagatgcttctatgagtacacggcagttcctaacgagctccgcgtcctcaaatcccagcttcccttttggtctctttcgcatctttcctcataatctccattcactttcacaaaacctcaacctggacccctaaggacacttccgtttccccaagtctgaattattccacctgaagctctccaacctgtattattaatagaattcttggctgggcgtggtggctcacgcctgtcatcccagcactttgggaggctgaggtgggcggatcacgaggtcaagagatcagagatcgaggccatcctggccaacatggtgaaactccatctctactaaaaaaaatacaaaaatattagctgggcgtggtggcgcacccctgtagtcccagctacttgggaggctgaggcaggagaatcgcttgaacccgggaggcagaggttgcagtgagctgagatcatgatactgcactccagcctaggagacagagcgagactccgtctcaaaaaaaaaaaaaaaaaattctcaggagaaactgtttaagacgcagataactatgtacaaccccgaagagatcctgaatcagcaggtagagccacgaaatggtaccttgaacagattccaagtgactgatgtagtggccaccctggttcaggagttcctggggaggggcaggggagggccagaagaaaactatatttttagctaaaagacctcagcttctggcttggcatggtggcttacacctgtaatcccaacgctttgggaggccgaggtgggcagatcacttgagcccaggaggtagaggctgcagtgggctgagactgtgccactgcactcccacctgggtgacagagcgaaactccatctcaaaaaaaaaaaaaaaaaaagaccttggcttctgtgtgagggaataggaagggagggaaaggttttcattttccagctgtttataaaaaaataaactggtactttgaggtaatttgcgtcaccagatacctattctagaaaccccaagatctgtgggacatccttccacatcagtggaaagccattcgcaaagaggacaaacggcttcttctctcatggatcattaacaattctcaaagcttgaacccgtatctgataaccagtcacatctggctgggggcactgtttgaggaaaggggaaccctttcctcaaatttaatagtccatgcaatcctcacctacaagagacttaacaggacacttaatttgctaaactttattttatacatacacgtttacatttactagtcatggtgtcaacttgttaacacaacgaagccctaatggacccgttttgaaattagaagctggacagttacaggctttggtctcttcaagaatccaattcacccctgggtttcgcttggcacacaccccaggagaacgtcgatgcacacagctgtgtagctgcaaacggaaaccactctcttttctctcgtatttttcagtcagactcactcaggattttgaaatgaatcatcacgagaaatttgttttaaagttgaatcactgagaacatctaacaactgttcacattctttatcacaaaaactgaagtcggaaaagacgccctgaaaacttgcaagggctaatactctatgatagaatattactactgttcaccatgttaatacatttacttactaccatacacctgaacagtcacggcagaacaagagcatgtgaatgacgaaaggaaacttgctttcagggtgtcagattatagaacatgcacaggaatttcttccacttctaacctcgctcatcagtcacatttacaagaaactcaattttaagcaaagagatgcctgaaataactaagacgtgtacaaaaacaagttaacctatgaacacaaggtaatattctgatagtcttcgatgtgacttccaacatatctgagtagtcacttttcagttttttaaacacgtgagaaaaatagatttggattacatctttgtggacggctacgatacagtttggaaaccattatctcagggaccctgctctctcctctacacatgcgcacgcaaacacacacacacacacacacaatgacacatggtggtctggtctaatatagtgtgtctgaattcagagggcagacattaacagccaagttttgtttttttgagagagagtctcactctgctgcccaggctggagtgccgtggcacaatctcggctcattgcaacctctgcctcctggattcaagcaattcatctgcctcagcctcctgagtagctgggattacaggcgcgcgccaccacgcccagctaatttttgtagagatggggtttcaccatgttggtcaagctggtcttaaacgcctgacctcgtgatcgacctgcctcagcctcccaaagtgctgggattacaggcgtgagccaccgtgcccggccaacagccaagttttaaaagatttttttcccctcttactataatgtgagtagtgaccttctgctgcaaagatggtgacagtttggtgcaaagatggtgacagttgggtagatggatggaattagagctggggacctaggaatgcctgcgtccttccctataatcaccccccttccccacaggattcctgagagggctcatcccaaatgggaatcaaagtgccatttttactaacagactctaaaactcaaagactttgaggtctaggcagacattctttttccctaaaactaactcttgggacctcctggctagataactggaggatggaagctggagactgaaggagcaataaaaccaggtttgcagcgaaggtcctggcttaacttaccccgctggttacacgagaggaaggcgggaggaagaatatggcagggccacccagctcttccaaatgccagggcctgcagaggtcgctgaccattccgaggagggagcaaggcgtgggggagaaaagctgaacatggatgagtgtaacagtgaccctgctcatgcataaaggggaatgaatgttctagaattttcccaatcctcttaccaactctcctgcctccgaagagaaggtgagtagagaaggcggtgaaacggcaggcctggtagagaaaagggcatagagatccacctcccttccccaactccctcccacccaagacctcacctatcgtttacctcagggccagatctctatcaacaggggccctaagagagtccaaagtcttattcagtgacaagagagaacttggttgacttggtacttcttccttgttctttcaactcctcagtatgggtggtcccccagatcaaacctttctggattctgcaaataaatgagagaacagatcaagaagggaagcagagaggtgtcattaggaaatgcattacttccaagaaatttctgggtccctgaacatttctattccccagccaggtctctagaaaacttcacccttaaagccacataccctgcaaacaccataactccaaagtattaatattttttttggggggaggggggaacagggtttcactctatcgcccaggctggagtgcagcagtgtgatcttggctccctgcaacctccacctcccaggttcagggagggtaagagcccagaccgcccttccaggagcccctgaaggccgatgctggagacatctggtgggcagatgtctggaggccaatcccaggccttggcctccccagtagctgggattacaggcacaaaccaccatgcccagctaatttttgtatttttagtagagatggggtttcaccatgttggccaggctggtctcgaactcctgacctcaggtgatctgtctgccttggcctcccaaatcattaaattcttttttttttttttggagacaagagtctcactctcgtcacccaggctggagggcagtggcacaatctaggctcactgcaacctccacctcccgggttcaagagattctcctgcctcagcctcccgagtagctgggattacaggtatgtggcaccacacccggctaattttttgtatttttagtagagacggggtttcaccatgttggccaggctggtcttgaactcctgacctcaggcgatctgcccaccttggcttcccaaagtgctgggattacaggcatgagccaccaagcctgggcccaaaccattaaattctcatcaaggaagatgggtcagatggagtggcaaatgaccacagtgacactcattgtgggtttcctctgccacctcctgcccaccagatgtctccagcatcggccttcaggggctcctggaagggcggtctgggctcttaccctcctcaactggtgtgtcatccacctcctgccatgcaccagggtcctcctcatcacccgcttgacccaccacctcctcgggctcctctgccccacctgccactcctgctcctcctgcctcatccacttgctggcacgagcccagtcacttctgctatcattctcaccattggtggcacgccgaggagagccttctggcttggccttcggacccctagaggttgaggctgttgcctcggcaggctgctggccccgaggggccttctgatctgatgcctcccttcttgagcctggccctttctttggcatcaccggcttcttcctgccatcttctgagtcaaccaagacgtaggagacagggcccaagctcaccttcttcttcttcctcatgggagcggggttcttggcagacacccaggccacggccttcttctttggtgggctttcatggccaccatcttggtctgactcagaggcgcctcctgggctctcggcttctgcccgggcatcctgaggtggctctctgggacccttccaggcacatttcgccatgggcttcttcaaagccaactcctccttattcacacagggctttctgctgcccttgatcggctctgagatcgccatgctttcagcatcacccacctcaggatcctccaagttagctgtgctgttggaattgatgcctttgggttttttccagggcactgcttcctgcctggagttcttcttctgcttctttctcctggagcgagacttagctccagccctgcgaaccaaaggtttggtaggctcatgctggtcttccgtggcattccagttgttgggggtctctgcctttaaggcagaacccacctctgctgcaagccccggttctttcttcaccttcctccctgctgctaaagcccaggctgccatctcctcgaattcagcggcctcctgggccctggcttcctcccggctgcggatctcggcatccatgcagaagatgatctgcaccactgctcccagaagcacccccagagcttctgcccagttctctgggggctgatgctggttctgggacagggtggggtggttgagctggagcaggcggaccacatcctcccaggtgcgcccctcggcatccaggaattcattcagattttttaaaaactcggcatcctgggtagggtctctacagaccactctccagacaccaccccttcctgggaattcacgggggatggtgctcagattcacaccttcaccaacctcaatgagggcagctttaacattctcttccctcacaaaaatcttgttgagcacgcggtacgggcccagtggggagaggaccccattcaaggtctcctcaatttctgcctgcccacagtcctctgggatgcctgtgaccaacaaggacctgtggatgtccacttccattcccctgcaccaatcctccagaaggttcatcgccatggtcttggacatttagcggctctgaacctactatgtgtagtaaatagtctatcaggtggacgtgggctgcagcggtctccaaacagtaatcctgcaaggtgacaagggagcgaggtcacgttcccaggaagatgaccaagctcacagatcctagctgccccctccgcggctggcctgcaggaggcctggcgctttcccaacaccctcctccccaacccaggccccggtgctcacacgtgtccctgaatctgcagcaaaaggccctaggaccctcccccgggcctgacgctccgcctgcccagccgggacttacttggcagatcagcctccgaccgcccagccaggccaaggagacgcagtggaatgcagccgtttcccagtcgctggctccggctaccccggcgccgctgctagaggcagaaagggccaagaaggcgccgtccgcccccgctccggcccaggcgggtcacggggcgtccagactcgatgccgttagcggcgagaagccgaggttggcgtcgcagcgcgcgcctgcgcactggctcccgcaccgccgctcgggggtcttgggctgcgcaggtgccgacgtctccatggcaaccgggcgtgggttgctagggctgagcccggccggcgcgccggcgctgcaattggacctagggagccgggtgcaagagtggcctgttcaggtcgcagagcaagcgggtctggatacactccggtggcgcctccacggaggccctctttcaacccaagtgggcctcgcgaacgggggttaggtcgatgagaagcgccaacacctatggctgcacccactgactgtattatcctctgccccacctgttggattcacccaacgcaactcttgggagacactagaaatcaagaaaggaggaaaacgaggctttaatcttcttgggttcctccaacagcaggtgcagttcctgttgggcttgtagccttctctcttacaagctgctgggttcttccaggaatttccagaaacttctagaaatttcttagtctcctccccgaccccttctagcatgaggataatgcctcgccttttcttgtttcctcaacgtgattcagggcaggttcttggcatcctccaggcaggggacaatgttacagctcagtgactgcccctacagagaagtgttagtccaaactgcaaccattttgtaagccctgactattttgcagatcttggtcaaagtgaaatattccacgggggttcgggccaatgagaaacatcctgcctaatcacctgaccacaaggcggacaaaggcccagctaaagaaacattatcataccctatcgtgcaaaggcccaactgaagaaacatccctatcatattctgctgggagaaagtgcagagaacaccacattccaccagaacaagggccagaaccgcctcatcatggaaccatcttatcaacatcctgctgggcagcaaaccatactgctcagacccctcccacccataactataagtacccccagcctataagcagcagtgggctctggcattaggctggttacccacttccacaggtgtctgcagtatacctgagttgctgttgagccgccttctgtctgtgtgtctttaaccctcaccttccctccaaaacctaacaaggagggctaccctctaggcagtgtgctgagaatagcacctcggggcaaggctgcagtcacatttatacccacttttaatgacgtgctaattaaggggtgggttttcagaattagcaaattggcagtaacttatgggtgttgccatggcaatggtaaactgtcatggtgctggcaggcatgtcttatggagagaggctttcggtgccttttccaggttttggccagtcttcaatgtgatcctcagtggagtcccctgggcctcctacctcaaccttgctgcccatgagcaagaactttgttaatagtttattaatgcccagtgctgtggctcacgcatgtaatcccaacactttgggaggctgaggagggcggatcacttgagctggggagttcgagaccatcctgggcaacatggcaaaaccccgtccctaccaaaaacgcaaaaaattagccaggtgtgataggggtcacctgtggtctcagctattcgggaggctgaggtgggaggattgcttgaacccaggagaccctgtctcaaaaaaaataaactaattaattaagcactcctatgagactcggttggactggccatctgtttttttttttttttttttgccagtccctcactgatccacctaccaatgtcccttcctggctgtgtgatcttagagaaataatttgaccccgctgagcttatttcttttctctgtaataggaattctaataaaaaatcttcctgatttggaagttttgaagattcggggggatctcatctgaaagatgcatggaagtacaatttgggccttggtattcaaccaaaatctgttctttgggttcatttttgaaactgacatttgcaaggccaaatagccaaatgttcatttcactgtcatctctggcattcctaaatttgggcatcatcaatacttgtgtgattgcccaagtttccatcatattttgtgctaaaaagttgtgtcattcaaatcgttaacctctgattattcacataattcacaccgaatattccaataaacactctagctatgattaaagtctttaaatctcatgtgctttatatgttgaaattctacatatcagtggaagaatgagtgtatatttttaggcagtggtttaaaaacatagccataaattctccgacacttctattgagaagtgacgatctgtgtcccctcctcgtgaatctgagcagacttgtgactactttaaccaatggagtttagtggaaaggaagctatgtggcttctcagactatgttacagaagggcacgcagcttcttcctcattcactggaacactttttttttttcttttttgagacagagtctcgctctgtcgcccaggctggagtgcagtggcgcaatctcggctcactgcaagccccacctcccgggttcacagcattccaggttgggaagaacaatgaacaatttttctgagagatggctaatcacaatcccccatgggcacaatgacctctttctgcatgtagccccctccagcatacccctatgaaacttccagtccctgcctttttgcagacagcccccttctctgctgtgctgcccattgcaaccgtgcaatgtattttcatatcttctctaataaatctgcctttctttacctacaactgtcttggtaaatacctttactgcccacaacacccgccgcacctagtcgtacccgtgacagttgggggtgactcaaatgactgagagctagaatcatctgggagtttcttcactcacatgtctggtgcctgggctgaaatcctttgaaagctgggctcagctgggaaatgttgatggaagcactgatgtggcttgggcttcctcacagcatgaaaaccagagggtagatcgttgaacttcttatttggaagctcaaggatgcaagaacaagagtgttcctgtgaggctgggcgcggtggctcacgtctgtaatcccaccctttgggaggttgaggcgggtggatctggacgtcaggagatcgagaccatcctggctaacatggtgaaaccccgtctctactaaaaatccaaaaaaattagccgggcctggtggcaagctcctgtaatcgcagctactcgggaggctgaggcaggagaatggcctggccaacatggtgagccgaggctgcaccatggcattccagcctgggggacaagagcgagacttcgtctcaaaaaaagaaagagaggccggcgcgggctcacgcctgtaatcccagcactttgggaggccaaggcgggcggatcgtgggtcaggagatcgagaccaccctggctaacatggtgaaaccctgtctctactaaaaatacaacaacaacaacaaaaattagccgggcgtggtggcgggcgcctgtagtcccagctactcaggaggctgaggcaggagaatggcgtgaactcgggaggcagagcttgcagtgagccgagatcacgccactgcactctagcctgggcgacagagcaagactccgtctcaaaaaaaaaaaaaaaaaaaaaagttactctagagaagtatttgggacccccatgggaatgagatgcgtctaccaccgtaacaggagggacctctgcatccaggacatctgggtccaggaacgctagtaggagtgaaggtagaaaaatgaagacgggctgggcacgatggctcacgcctgtaatcccagcactgtgggaggccaaggcaggcagctcacctgagatcaggggttcaagaccagcctgaccaacatggagaaaccctgtgtctactactaatacaaaaattagccgggcatagtggtgcatgcctgtaatcccaggtacttgggaggctaaggcaggagaatcgcttgaacccaggaggcggaggttgcggtgagctgagattgtgccattgcactccagcctgggcaacaagagtgaaactccgtctcacaaacaaaaaaaaaaagtaaattattttttgaaaaataaatataggttaaaatagtgaattttatgttatgtgtattttactacaaaagtgaacaaataatgcgttacagaatggagagatggggggcaagggagggagagagatgccttcagctttgcctcaaaagccaggtttcagctttctgcagagccaatattcctaacagtcctggctgccccttcaggaatgccacccaaccccagtgcatgagcacagaatcaaagttctggaactttctcttcaaagagaaaacaaaacatctcagtgtgtttgaaaattctgctaaggatttgtcagaccaaaaaaaaataataataaaaaaataaaagaagaagaagaaaatcgtcaatctagacaggataaaaagtaaatttataccagcagtggattgtaaaacatcataactaaaatgaaatggaatggatgtttgctgaatctcagaggcttttgctatgtttgccaagtagttttacaaatgcgggagcttgtttgtgatccaggctgcagacaaagttgctgcagtggaaactgagtcacacagtgactcagttagaattagacactgtctgttttttcttctctctttttcagttatttattttggcatgcaagggaatgacagacactgagttttgataaatactggatttttaaatgcaataatcctccaagtgactatctctggggagaagaagagggcaagtcatatgggaggtaggacacagcctatttaaacaataattttgtttaaagatgtgtaaataaatttagcatagtattaagatttaataaagaatggcaagggatacataagggttaattatataaatctctttttttttttttttctgagacagagtcttactctgtcccccaggctggagtgcagtggcgcactcagcctccacctgcagggttcaaacgattctcctaccttagcctcctgagtagccgtgattacaggcacgtgccaccatgctgagctaatttttgtatttttagtagagaaggggtttccccatgttgcccaggctggtctcaaactgctgacctcaagtgatccgcctgcctcggcctcccaaagtgctgggattacagacatgagctgctgagtccagccaataatgctaaaaaaaaaaaaaaaaaaaaaaaaaaggtgtaaataaatttagcatagtattaagatttgatgaagaatggcacgggatgcatgaggattagttatataaatatcaattctttttttttcgagactgagtctcactttgtcacccaggctggagtgcagtggcgcgacctcggctcactgcagcctctgcctcctgggttcaagcagttctcctgcctcaacctctcaagtagctgggattacagggacccgccactatgcctggcaaatttttgtactttgttttgttttgttttgttttaagacggagtctcgctctgtcacccaggctggcttgcagtggcgcgatctcggctcactgtaagctccacctcccgggttcacgccattctcctgcctcagcctcccaaatagctgagactacaggtgcccgccaccacgcccggctaattttttgtatttttagtagagatgaggtttcaccatgttagccaggatggtctcgatcttctgaccccgtgatccgcccgcctcggcctcccaaagtgctaggattacaggcatgagccaccacacccagctttttttcttcttgagacaggatcttgctctatctcccaggctacagtgcagtggcaggatcacaactcactacagactcaacctcctgggcacaagcgagcctcctgcctcagcctcctgagtagctgggaccacaggcatgcaccaccacgcccagctaatttttaaaatttttttgtagggccagggtatcactatgttgggtaagatggtctccaactcctgtctcagcctcccaaagttctggaattataggcatgagccaccgtgcccagtcaattctctattcttgactttgagtttggaatattccacaatttttattttattttattttattttattttattttattttattttattttatgagatggggtctcactctgtcacccaggctggagtgcagtggcttaatcacagctcaccgcagccttcatctcctgggctcaggcagtcctcttgactcagcctcccaggtagctgggactacaggcatgtgccaccacacctggctaattttgcatctttagtagagacagggtttctccatgttagtcaggctggtctcgaactcccgacctcaggtgattcacccgcctcagcctcccaaagtgctgggatgacaggcatgagccactacacctggtttttttttttttttttttttttttttttttttttttgagacagagtcttgctctgtctcctaggctggagtacagtggcgcactgcaacctctgcctcccaggttcaagcaattctcctgcctcagcctctcaagtagctgggactacaggcgtgcaccaccacacctggctaatttttgtacttttagtagagatagggtttcatcatgttggccaggctctcaaactcctgagctcaagtgatcctcccgcctcagcctcccaaagtgctgggattacaggcatgagccatttcattgcatctggccatgtttttgccattactttcaatggcaaaaactgcaattaattttgcctcagcctaaatattataaaggtacaactatgtgtgtatatgtgtgtgtgcgtgtgtgtgtgaagtggagtcagctgcctgcctgctctcccattaaagagccacagtgattgctagctgatttaaaaatagttcaagcacccttaacaggaatcattacagtggtttccatgacaacacgatgtgctgtggtttccaaggcaacaactggcactgtggtttccatgacaaagcatccctgcagccccaaccctcccctccatctctgcacttccagtttagggttctccttccatcctcttccgctgtgtttcacctttgagtttttattttgccctgctgtgtatgttcagtgagaacccacagagtttccataaacactgaacccaaagaaagtccagggggctctgggatcccgcctagatgtttcctcctgagtcagttgcaacaacccatcatggtggttctgtgactcaacctggctggctctgtccaatttgttctgtgagagccccttcttgctgcagagtttccttttttaaattattttttttcttttcttttcttttctttttaattgaggcagaatcttgctctgtcactcaggctggagtgcagtggtgcgatctcagcgaggattacaggtgcatgccaccatgcccggctaatttttgtatttttagcagaggcagggtttcaccatgttgaccaggctggtctcaaactcctgacctcaggtgatctgcccgcctcggcctcccaaagtgctgggattacaggtgtgagctaccatgcctggctttattttctattatatctacgtgtgtgtgtgtctcctaggtcacagcaaaatgtatttcttatcacggatcatgatcaaacacatgtgacagccactgccataggttaattaccgagtcccctatggatggctatgcaggtcgttctctattttccggtctttcaaatgaagagctgagaagggctggtggctgatgccctacagacatctatgttgcttggattcaggtgtgacttcttaacttgtttgaaaatatggccgggcgcggtggctcacccctgtaatcccagcactttgggaggctgaggcgggtggatcacgaggtcaggagatcgaaaccatcctggctaacatggtgaaaccctgtctctactaaaaaaaaaatacaaaaatgtagccggatgtggtggcaggcgcctgtagtcccagctcttcgggaggctgaggcaggagaatggcgtgaacccgggaggcgaagcttgcagtgagccaagattgtgccactgcactccagcttgggcaacggagtgagactccgtctcaaaaaacaaaaaataaataaaatatgatgcttttcaaaagttacagtgtcagctggttgcagtggctcacgcctgtaatcccagcactttgggaggctgaggcgggcagatcacttgaggtcaggagttcgagattagcctgcccaacatggtgaaaccccgtctctactaaaaatgcaaaaattagctaggcatggtggcccatgcatgtaatcccaactactcaggagactcaggagaatcgtttgaacccgggaggtggaggttgcagtgagccaagatcacaccactgtactccagcgtgggtgacagagcaagactctgtctcaaaaaataaaataaaataaatgaaataaaataaaatagcccgagatgggaggattgcttgaggccaagagttcaaggctaggcaacatagggagacacctgccctcccaccaaccctgtgtctatttgtaagataaaaaattaaaaacggccgggtgcagtggctcatgcctgtgatcccagcactttggggggccgaggcgggtggatcatgaggtcaagagatcaagaccatcctggccaacatggtgaaaccccgtctctactaaaaatccaaaaattagccaggcgtggtggcaggcacctgtagtcccagctactcgggaggctgaggcaggagaattgcttgaacctgggatgtggaggttgcaatgagccgagatcgcgccactgcactccagcctggtgacagagcgagactccgtctcaaaaaacaaacaaaacattaagaacataaagtccagtagttttatgccacaatcctagcaactctatcctgggccgttctgagttagctctctctctctctctggaaataaccaataaaaccttaggattatgcggcgggagaagagatgtgttctcctttgagctggggcgggaggcgggggtggtggtcgggttacagccacagctgcaggccctgaatttccttctgacagaaaaaacgccagcagctgtctccactctctacagtgagggaacaacattccaagtgaggaattgtggccaggaaaccgagaggccccatgtccttttcttttcttaatgtattttttctgaaacacacacacacatacattaaaaacaatccaccaataggattacattcatgtaagattcaaacataatcaaatctaccgtgtggagaaattcatagtttgttaataagcatacacgtgtatagaaaaggcagcgtttatcacaaaacaggatgttatttatccctggggcagggagggatttgagatggccagagcacatgaggggcttctgggaggacgatgatttctagatcagatgacagtaacataggacttgctatgtaattatttgccaaattatatatttgtgtttagggcacgtttctggaggcatgttacatattctacaattgtaaaaaaatgtttttttaaaaaacacagctacacattcagggttatagcggtgaaataaatgttatcactatttttttctagaatattctatggctgaaaacctgaacgcagcagtaaaagtacacgtttttaaaacgactcataaaccaaatgcacaaaacacagtcaggtgaagtttctctcatttgttacggaggttggtcgtatttcttcctggtgcctggaagacgtcacgtggtctgaacacagtcttggctggtgatgattcctgatttttgtctgaaatccttggccaaagaaaagaaagagaacaaatgagtctctttatttttttttaaagaaggtttgtatcatatttctcgaattctaaatgtatatttatgtttgacaaaagttataaatatctacttgaagaggtaacacaggagaaaaactggcaagccaaatttaataaacgtaatgaagagtttacattgtgttatgtggagagagatcatattctcttgttatgggcggaatcttatcgtcttgtgggcttggaagatgtcacacaaaggaaataagaatcacatacatttacagacaggcctggccaacatgatgaaaccccatcgctactgaaaatacaaaattagccgggcgtggtggtgggcgcttgtaatcccagctactcgggagactgaggcaggagaaacacttgaacccagaaggcggaggttgcagtgagccgagattgcaccactgcactccagcctgagcgacagagtgagactctgtctcaaaaaaacaaaaacagaacaaaaagaaaaaaagaattacataaatttaagccctaaatgcaaggaaataggttaggtaggacattaggaccgaggggtcaccctaattaggaacagaaacgtatgatccaagagtagagagattttttgccaactgaaacaagatttctgcaggaatgaggccatctttcagggccacccactcaccccggggaaaagtttttagcttagaggttgaagagaaaaatgaatcatttggacatctttcctctttttccctccccttggctaaacccagtatttccattaaaatgctccacgtccatcccaccctacttagtctacttgcttttgttttgtttttttccctagcaccatttatatagacttttttttttttgagacagagcctcgctttgttgcccaggctggagtgcaatggcatgatctcggctcactgcaacctccacctcccgggttcaaatgattctcctgcctcagcctcctcagtagctgggattacaggcacgtgccaccacacctggctaatttttgtatttttagtagagactcggtttcaccatgtcaaccaggctggtctcgaactcctgacctcaggtgatccacctgcctcagcctcccagagtgttgggattacaggcgtgagccaccgagcccagccatagacattctttatctgaccacaaaagtgatgtatgattactgtagaaaaacttgataaatatggggagaaaatcacccatcattctgctgcacatatatcattaccatttcactgtagaacgttttgcttattaaagttagaatattggttttaaggagttcgaggctgcagtgagctgtgattgcaccactgcactccagcttgcacgacagagcaagaccctgactcacacacacacacacacaaaggaatgtcatatcagcagtcagactccctgggtgtcaacacttcctggtggtgtggctttggacaagtaattaattaacttctctgtgcctcagtttcctcatctataaaatggtaactattagactagtaccaaactcataaagaggtgaggcttaaagaagtcaattcaagtaatggtcttagaatggtgcatcacaagtacccaataaatgtaagctataattatcatccatgtgaggatgctgtaaggatgaaatgagttcattcatacaaagtgtttggaacagcccccttggggccaaaataggacaccttgttggctctatgtaaagattcactattaaaattaaggaaaatgttttaattgggggatgcaagagtttcatatctttatttcatatagctacaaacttaaactaaggctagattctaaaaatatgtctgttcattcaaagcacataaaaagatgctcaatatcattcatcatcagagatattattaaaaccatgatgagttgccagcctccttgctttcttttatacacagcaactcaggccagacgcggtggctcatgcctgtaatcccagcactttgggaggctgaggcaggatcacttgaggtcaggagttcaagaccagcctggccaacatgatgaaacaccatctctactaaaaatacaaaacttagctgggcatggtggcatgcgcctgttaattccagctattcaggaggctgaggcaggagaattgctagaacctgggaggcagaggttgcagtgagctgagatcgcaccaatgcaccctagcctggcaacagagaaagactccgtctcaaaaaaaaaaaaaaaaaaaaaaagaaagaaaataagagaaaagatggagaacaacctgaatgtccaataatgggactgattttcaaatatggttcattcacacagtgtaatactacacaattgttaaaaagaaaaaaaaaggcatgaggaagatctcaatgtgctgataaagatgtccaagctacaatgttaagtgaaaaaagcaaagtaaggatcattatgcataggatgctactatttatgtcgaaagtaaggaaaaaatgcacctattcatatatactttatatgcattaaaaatacttggaagtggctgggtgcagtggctcatgcctgttatcccagcactttgcaaaggaggccaaggcaggcggatcacttgaggtcaggagttcaagaccagcctggccaacatggcaaaaccccgtctctactaaaaatacacacgaaaggaccaggcacggtggctcacgcctataatcccagcactttgggaggctgaggtgggtggatcacctgaggtcaggagttcaagaccaacctgaccaacatggtgaaacaccgtctctactacaaatacaaaaattagccaggcatggtggcgtgcacctgtaatcccagctacgtgggaggctgaggcaggagaatcgctagaacccaggaggcggaggttgcagtgagccgatattacaccattgcattccagcctgggggacagggcgagactccatctcaacaaaacaaaacaaaaccaaaaaaaatgcacacaaaaaattcagctgggcatggtgttgtgtgacggtaatcctagctcttcgggaggctgaggcaggaaaattgcttggacccgggaggcggaggtttcagtaagccaagatcgcaccactgcactccagcctggatgacagagcgagactccatctcaaaaaaaaaaaagaacacctacccggtaacagcatctccaccaatcacgccaactctggttttgagcctctgaaatcaagaaactctgctttcaaacagcttatgtgagcttctgtttttggccaggaaaagcctctctttgtcccccctcctcagacgcatctgtggcttgccatagccctgcatcctggattacaatcctttgtgcttactcctgaatacattcctgctatcagaagacatttttctctgatgtcttttttttcaggttgacacaatagatagcttatttctttaccccgtttattgtccttgtctttttaacagaccatcagctctgcgggtggggcctttctatctgttctgctctggtgtgcccccagcttctagaacagggctgtgctgtgttgaattgtgtctctcaaagttcatgtccactcagaatctcagtgaagatgagatcatgccgaattgggttgggctgtagatccaatgactgggtcctagtaagaggaaaggtacaaccaggtgcagtggctcacacctgtaatcccagcactttgggaggcccagacgggcgaaatcaactgaggtcgggaatttgaggccagcctggccaacatggtgaaactccgtctctactaaaaacacaaaaattagctgggtgtggcggtgggaacacctgtaatcccagctacttgggaggcagaggcaggagaatcgcttgaacccaggaggcggaggttgcagtgagccgagatcgtgccactgcactgcagcctgggcaacagagtgagactccgtctcaaaataataataataataacaataaatcctaatacagacacctatgcagatacgtacagaagttgttgggagtatttcattttttatcaaataaaggggaaagggtcatagtgtatgaacttttcttgcatctcactgtgttcactcaaaaggtcccagtggaaactctccagtccgtcctttcaagactgcagaagaacccttgtgtggttggaccatggttcacttggccactctcctatctgtgggcatttgcagggcccgggctgttttgccaacacagtgaagccaccttgatgcttaaaacttgagcccatgccagcctgtggtgtgctagaaatcctcactctttatgaacccaatcatctcgtgcaccacggtggttgtgttgctttacattttgtgtgtattaaagccatcatttgctaaatgtcactgattaaactataccaccgttcagtggtgcggctgaaatgatttgacacatcttcattttctaatgaaccaggagacttttctaaaaagcagactgggccgggtgcggtggctcacgcctgtaatcccagcactttgggaggccgaggtgggtggatcatgaggtcaggagatcaagactatcctggctaagatggtgaaacctcgtctctactaaaaatacaaaaaaattagccaggtgtggtggcgggcgcctgtagtcccagctactctggaggctgaggcagaagaatggcacaaacccgggaggcggagcttgcagtgagccgagattgcgccattgcactccggcctgggccacagagtgagactccgtctcaaaaaaaaaataaaataaaaaattagccaggcgtggtggtgggtgcttgtaatcccagctactcaggaggctgaggcaggagaatttcttgaacctgggaggtggaggttgcagtgagctgagattgcaccattgcactccagcctgggagacaagagcaaaattccgtctcaaaaaaaaagcattcacaaactcctaaacccacaattttaaacaccatgctccaagactcatcagtctagacacacacatgcatacaagcctatgcacaaacacagatcaatacagacacccacactatgtgcagacacatacacctactcatgcacacactcacacattcactcacatagacacggacacccatacacaccctaatggctgaggggtgagcacacacctgtatgcacactgggacactcagacatggattcacatacacacccctaagtgtacacacacacatacactcaagagacacacgtgtcaatcacacacaaggttttgatcctcccaccccctctgagtatccctgacactttgggcaaatctgtctcccactagagtctctgtttcccccttgagtggacatactattttctgcgttccattcccagcatcttcagtgtgacatccagtgaggccccaggggtgcaaggagcccttgggtaacttgagatgagatgcgaacagaggcgtcaatattttcaaatcaagggggtttcaaatggagcctgcagggccagttcccctgaggtagccagttgatgcctctggggtatggtttcaaacgccccagaaaaccagagatttgactccaaatcagccttcatctggaccagtccagccacccctcactgtcactaaagagaaaaatgagaggccacaggtgattccagaacacagacatgaagggaagagatgctaccctgagataggggttgggggaggggggctttctgggtccccctcccaggctcactgggtgtgacaagagaagaggaaatggttagagatgggaggaggggtttggagccccgctgcctgactcccccagcattgccccttgcaagctgtgtgaccttgggctgattacttgacctctcagtgcctccacatcctcatgggaaatggggatcacagcagagctttcctgccagcactgcccaggggactgaagagggtgtgatgtgtttgtgaggtcatctcgtcttatttctgctacgtatcagcggcggccagctcttcactgcacacctcagccctgacagggaccccagggcagcggtgcccaccccggctgcccctggaatgacccagagcccatgtccagcctgcagatctcggcagccgctctcggaatctctgaatggtgcagggcacggctggggcagcaacagtccctaaagctccccggtgattccaagcaatgggcagccggggctcacaaccgcgaccctaggggtcctagagaccatcagacgccacagccgtggttctcaaactagtcccgcatcgcaggcacctgggggtcctttgaaaatgcagcttgctggacctcacccccaaaggggttctgtaggtctagggtgggcccgagaatgtgtatctagttcccaggagacgttgacgcaggtccaggacctgattttgagaaccgctgtcctgcaggaaagtccgctttccccagcctggcgttcaaagaccagggagggttgtccctttaaagcgctggggaaagcgccgtggccccacgattttaaacggcggaactggggtgcctcctggtggaatcagcgggcatcgcaactcgcgcggattcttcccctgctctggagtcgtaggttgcgggggcaaagggaagggtcgtcgtctgcggcgcagttctaggacgtggccacattcccagagtttggggatcgctcatttcccgcttaagcaggccgaggggccaagacaagttcagcctctaggggaaagggtctggaccccgggattcttcgcggtggggaggtggcgggggaggggggagagggaagaggtgagggagggtctggggtctggaccccaggataccttggcctcatccttgggggaggaccattccgtccctcccctggggccgggagggccgattattcgagggagccgtagagtaagacaaacgtgggttccagctcccttccttgcctctctgagcctcggtttctctatctgggaaatgagggtgaaaatctgccttcatcctcttccctccttcatcctgccctcctctctacagagccaataaagacgcacagacatatacattcgaatgtgtccacccccagatccacacagagacacaaacacatacacacacaacctcagcccgccagtcacctggtcagctgaaatcaggctcctgaaaactcttcaaccacttcctgccatccccaccaccctgcgccggtccagccttaggcctgtcccctaggttcccgccccagcctcctcctgctccagccttgcaccctgcacacgacagacctaaagcataaacctctccctctcctgttcaaatccctcccatggctccccagcgcttaacgaggccctgaggccctgccagtctgcacgccctactccagggacctcttcatgctcatttgctgcctcaggtgaaaatccagccagacagcgaccaccatggaggcaggcggccttctttggcgtcactgcctccactccaccagcacttagcctggcatgggaggggcagtaattacacgctaataaccccctacagtcatacccttggcttgggaagcttttgccctggctcttcctacaccccggtcatggacttcccccaggcaaccgccggccgcacgtccttcgggtctttgcaacattcagagaccccgtctctacaaaaaatgcaaaaagtagctaggcttggtggcgcgtgcctgtggtcccagctactctagagggaggctgaagtggtgggaggatcgcttgagcccaggaattcgaggctgcagtgagccgtgatcgcgccactacacttgtcaccttctcagtgagggcttcccaggccactttcccaggcccgtttatgacgactgcaaaccctctcctgccccggccctcctcgggccccctgcttgccggacttttgtcccccagcaggtctcaccccctaatgcatggatttcgtcctcatctagggagcgtaaccccagcctccccaccgcatgctccctgcgggagggtcctgtttcctgcaccaagaacagggcctgggacgcgccagccctggataaatctcatggactgcgcggatggcgctgagggctcctcccagacagtcgccttctctcccaggagggggcaaccgcgctccgctccacccgtcgccagaggctccacgcgcgggacagacccggctgctgcagcctgtgctggtctctgtgcaccgggacccttccctgcaggatctcaaggcctttacgcggctgctccttcgaccccaaacactcctccccatccccgccggagcactccctccaggaatgagggaatgaaaacaatgtttctttccagcacattccccaccaggcctatctgggatctgactcacccagtccgcgtggttcattccgaccgtcagtcattcaacaaataacagccgccgccgcgtgccaggcacggtgttggggctggggacacgaaggggaaaggccaagccacactttttccctacggagctggccctaagccgctctgccgcgcctctccccgccacgcccacctgcccccatgccgcataggtccccacagccaccgctcagggccctctgcaggggctgctgctgctgcaagcccacggggcgctggggggagtttgaaagcaggaggaaagggacgccatttgggggaatgctcaggccgtggtggcagcagcagctggcggtcactgcggtgaaccaggggctcccgggtctctcctcaagcaagccggccccgtgcgtggaacttggcagtcctacactagggctctgatcaccagcctttcccaagtggctcctccagccctcgggagggagcagctccctgcattgctaatattgggacaaaacgatctccctgtttttgcacttcctgattgcaataccccagtcaccaatttcctctattaacctccctgacaagtacagtcggtgtgccagggggcagtcatagctctgaaaaataaagggaggaagtgcagaaagggttccttttttttttttttttttgagacggagtcttgctctgtcacccaggctggagtgcagtggcacgatctcagctcactgcaacctctgcctcccaggttcaagcgattcttctgcctcagcctcccaagtagctgggattacaggtgtgcaccaccacaccagactaatttttatatttttagtagagacggggtttcaccgtcttggccaggctggtcttgaactcctgccctcgtgatccaccctcctcggcctcccaaagtgctgggattacaggcatgagccaccgtgcctggccggccacaaagagttacatttttataggtggtcagggaagccctccctaggaatgtggcatttgaagaaaggtctgagtgacatgaaggttggagccacgcctatagcccaaggaagggcactccaggctgcaggaagagcagtgcaaaggccatgaggcaggaatatgcctggtgtgtcccagagacctgggtggctgaagccacaggagacacagagagggcagtgggaaacaaggcagagggtgagatgggggtggagtgtgtagacctgagctgcgagggagagctgcatgcgatggccatgtcctgcaccagcaccgtgcaatgcggtagccactggccacgtgtggctcttgagcacttgtgacgtggctgggaagactgaggacatgcatgtgtatttttatttaatcttaattacatttaaatccaatttaccccgtgtgattacctagttgaacaaagcatgtctagacagtcctaagaactgcagatatgacggcacaggaaggagaccttgggggatctggggaggcgagggacgcaatcagaccccaggtgtgacttctaagaggacgtctctggcagccatgtatggtggggggacacaggatggagggaggcagaaaactcaggtaggatggaaagctgagtctgaggtccagggcacaggtgaggggtggaggctggggggagagtgcctgcagctgtggcctggcagagtgtatctgggtggaagctagggtggggattggctgggcggggtctccatgggtgtccaggggcttcggagctgaggctggaagtggggaggcatcaggggtgggagtggaagctggctcagatctgcaaggggtgagatgatgctggggggtagggagagccaggcagggatcccgaagcagcaaaggacagtgtatgtaaaccagtgacaggacagttcccaggtattctgggcaaaccacagtcaagaccgtggacatctgtggcccacgctcccacaccccgcctgccccactgcccagagcacagagagagtacagtgctgaatttcactttactggaggatccaggtgacacagggcacagggagagaagcctaggactgctacgggagaagcacacctggggccctccccacccacaggcaacaccacaggctgctgtgcccagctcaaggtacacccagcctggtcctcagtgggtgggtcactgtccagggacagcctccaagcagaggggagcacccacgccctgcagcaggtctcagtcagcttctacatctgggtgtccctgacataggactgggacagtctggtctggactgtgaggtcacacccaaaccctcctattccttcccagggacaagtggggcagggccccctggcacgatgggctcctcactgccagggaatggaaattgggacgaggaagcacacacattgccccagggacaagaaggcatgaatgaaggtggggtcccgtggagactgatatttaggtaaaaatcgagctcagccggggttgcaggagctgaagcatacggcacggcacggcacagactcacatacaactcaagcgtgcttgggacagcaggttgtgaagcctcacagcaccggcccgcctactctggaacctccagggcagggctggggtttcctccccaggtcatttcatcccctgtaaggagggacacgcggccggcttctgcactgcccaggtgagcctctgtccctcacagtgcccttcggggcccctctggcctttaattcactcagggggtgaacccagggactttcaagtcttttagtaagggctgcaaggccagcgctgagcggtgggtcagctccactggagagggggcacccaggggagccacagcctatgggaggggccagggcccactcagcccagaagaaccaaaactggattttaagtgaattaccccaaattgaacacctctgcaaataattagaatgttgggaaacactgcagtctgagtgacaaattcaacttgtggtcaggggcaggtggccttggcctggggctggttcctttgttatcaggggcgccccagtaggcagggctggcatgtgtcttccctctgctcccccctccccctcctcctcctctttcccttctcccaccgttcctctcccctttcctcctcctccccttcccaaccgccttctatctctcagactttcctttctggaatcatctcttcccctggctgggagctggggcctcccctggctgagagttgcgccctgacacgcgctgcgcggctggtgactgagcctccaccacagacccagggcccagtcagactggggtaggggcgacagcggcctacagcacctgccaggcgcaggccccgagagcgccacgaagagccctgctcgcctctgcaggtgcccggcgtccacacacacaccccctccgggggcaacccgggcccccaatcctggtccacttggcgcgtccccatctcggccctgcgctgctgcctcgggcgcccacttctctttcctcctcccatccgggcttcctccgtcgggatcgctggcgcccccggcctgcgagggcccgagaggggaacgtgacgctggcaaaacgcggcccgggcgcgctgtgaagcgaggagattgcgtctgcggaggacaggaagaggggaggggagggcgggggccacaggcgggcgggtgccctgcggggcctgctcgcagcctgggcggcttcttggggggccactagcggcatttagggggcagcctccggccccgacgggccttcttcccgcgcgcggccttggatccagtgggcgcctggcccttggcctcgcctgccctggcatgggccccggcgcccgcgctccccttcttcttcctgcttcctgcggcgtcgtcctgggccgagccccggctcccggctttcttctcgggagtgacgccccggcctcggcctcggccgcccgcgcgggttttgcgggccccggaagcggtgggaggcgcgccggccggagtcaggcccctgggggccgtgcgcgccctcttggcccggggcttcctggatgccctgtcctccggctccgacgcctcgctctcggtgtcctccgactcctcctcggactgttcgtccgaagcctcctccgacccctcgttggaccccatgttctcccgggcggccaggagcgccaatacctcccccagtttgcctttggggtatttgtacttcccgccttcccaggcgttttctttttcctccttcatcacctccgccatgtcctgggcagccaggagcgccaccagctccagaagacccccttcgtcctcacggtgctcgctccagcccccgaagaggccacgcccagccttcttcgcctggggagggagatccggctgcgccaaggtggaaatgcactcccggaggtccccgtcatccccggccttgcgcaggaccacggcgtccacctcgcggcccgcctcttccaccttcacgcgggtcccgttagtgtccttggacatgacggacaagacctgtcggagggggtctcgcttgtctttctcgtcgctccagcccagcgactcgataacagaagcgattttcaacatctcctcccgggcccaggggtccgacgggtcggtataggccacaatggccacgaactcaggattatccaactcctctgtttcttggtccccactttcctgcgagtcgctctccgaagtgtcgctgtccaccggctcctcgtccggggtgtctctcacagccagcagggccactaagtcggggacaccatttttgtcttctttggtgttcaagcggatggattcggccccagctggctccttctctgcctcttctttcttcgatttgtcggtgacggtgaccagagccaagaactcgcggggaccgtcttcttccccctcggagttgcagggcgcccactgcctaaccagctccctggcagcggcctgcagcgtggcgtacagcgcgctctggtcctcttctccgctcaggtcgccctggtcgatctcctcgatcacgatgcccaggctctcgtcggaagagtcctcggcctcactcctcgcgggagcagacggccgtcctcctcggcttctcttcttgcccttctgggtcaacctgttgcgtctggttctgtttctgcgaccccgacggcccctccttgggttcctggctgccccaagaagcgagccagcctgccctgttacctccccagaatcctgggcctgcgtctccgaagcgggaggggtgggtgcctccccgggggtcccagcctccgcggcctgcgtgggcccgtcatccagcagcaggcgtctcatctgcctcaggaccctcgtgtcctgcgcacggtccttccacagaaccctccagaccccatccttgcctgggatctccctgggaatggcagcgtgattgacgtcctccacaaactccaccagggcggcctgggccttctcgttcatcaaagccttcatgtgtcgcaacctgaacgtgcccaggggcaggagggtcggctgcaggacggcttcgacgtctgcctgctccaggccctccgggatgccggtgaccagcagggccctgtgcgcgtccacgtccaggctccggcaccagtcctgcaaaaggctcatggccatggtgcagcccccttggcgctgatcttggggcagcagggagcccgagataggggtgggctgcagcgcacggtgtcaatgcaaccctagaaagccacttgcagggcttagagtcccggttccggtgaatgtggcaaggctggagtggggctcggggctcgggggctctagctgcctgctggccggctggacgcagtgaccttcccccgggacccctctccagagctgtctgaggatccgcggggggcttacgtgtctgctttccaggacagctccctccctctctccctgacacaggcctgagtgactcggcaccgcagccaggtgcaggggggcggcgccgagtgcacctggagaggcgtgggaggtagcagccgcagcttgcctggcgctcgcgccgcgtctgagcgcgcaccctgggcctgaatctcagcagttccgctgcgacgcggctgctcgcgcgtgcgcctgcgcagagggagccgcacaccctcccctgtcccccgcccaaccgtctccatggcaacggtgcagccttgagctggggtctgcgtcgctgtggcctgagacgcttttcttaaaggtcccgatgacaaggacttggggcctggaagcaccactttcattaaccagcaaaaaacaaggccgaaaccacagagggccagaaatcactcaaggatacccgacctcattcaggggatagaggcctccttccagagggtaccggcatcactgggggttacaattcccccttccaggggccaggtggaattcaggattatataggcctaaatcaaagggcactggccttgcagcgtaggaccaggacttactcgggatactggcctcattcacagtatatgggtctcagtatcaaataggggggcccaggcaccacctgtgagcaagacaccattcagggtatatgggcctcacttgcagggtacaggccccactcgatgggaccggccctcactcccatacacgttcctgtattctgaactatgcatgcacaataaatcctgtggttttgcacacgctttgagcatatgtatgattgtgagaccaggcatgaattttgcaagaaagcatttcccttgactgggacagcagactggggcgtgtgaacgtcagtcatagctactgtaaacatgcatttgcttctctgtcccttgttggccatgaggctgtcccctactctatatgaatctggctctgtagaccagctggtaggtttatatctcaaccatcatccctacctcaaagggttttgtttttttgttgttgtttgttttggagatggagtcttgctctgtcactcaggctggagtgcaatggcacaatcttggttcactgcaacttccgcctcccatgttcaagcggttctcctgcctcagcctcctgagtagcaaggatgacaggcctcccaagtagctgggattataggcatacaccatcacgtctggcaagtttttgtattttttgtagagatgggtttttaccatgttacccaggctggtctcaaactcctaacctcaagtgatctgcccgcctcagcctctgaaagtgctgggattacaggattacatggtgagccaccatgcctggcctcaaagggttctcatgaggattaaagggaataatccaggaaagcatttagaagagcagctggcccacagctggtgctccatgaaagatggctaagagaagtatttgttgagaacttaccattataaaagcatctgttttgttggtttgtttttgagatggagtcttgctctgtcgcccaggctggagtgcaatggagcaatctcggctcactgcaacctccaccacccgggttaaagccattctcctgcctcagcctcccgagtaactgggactacaggcatgcaccaccatgcctgactagttttttgtttgtttgtttgtttgagagagagtctcgcactgtcactcaggctggagggcagtggcgtgatcttggttcactgcaacctccgcctcccggcttcaaaccattctccagcctcagcctcccaagtagctgagattacaggtgcccgccaccacgcccagctaattttttgtatttttagtagagacggggtttcactatgttgggcaaccttgtctcaaactcccaacctcgtgatccgcccgcctcggcctcccaaagtgctgggattacaggtgtgagccaccgtgcccggcctagttttgtatttttagtagatggattttcaccatgttggccaggctggtctggaactcctgacctcgggtgatctgccggcgtcggcctcccaaagtgctgggattacaggcacgagccaccgtgctcagcccaaagcatctgttaataaacaaataaataggaaaccaaaacacctcgagttttttgtttttgccaccaggcccaaccccttacttttgtgtttggatttttttatgtttaaggagagtttaactgcaaggttaccacagcaactgggcaaaccgcttactcactcctattttcccccactttttcctcctctgatcttcctgatccacagatggatgtgatgtgactcttttctccagagcagcgttgtccagcaggaatagaatgccagccccaaattcgaaccgcacgtgcaatgttaaaactcctagttgcagccagccaacactgacctcaggtggtccacccacctcagcctcccaaagtgctgggattacaaagtgtcatttttgacatttgaatctccaatctaggctgggcatggtagcgcacgcctgtaatcccagctacttggaggctgaggcaggagaatcacatgaacctgggaggcagaggttgttgcattgagccgagattgcgccactgcactccagcctgggagacagagcaagacgctgtctcaaaaaaaccaaaccaaaccaaaccaaaccaaaccaaaacaaaacaaaaaacgagctgctttttctgcatctattgatctaaaaaaagaagaaatatggtgactcaccatgtaatcctgtaatcccagcactttcagaggctgaggcgggcagatcacttgaggttaggagttcgagaccagcccgggcaacatggtgaaaacctatctctacaaaaaatacaaaatttcctagggggccaccttcaataaatagaaaagagggaagaaaaatgaattttaagaatagattttggccaggcgcagtggctcacgcctgtaatcccagcactttgggaggccgaggcaggcagatcacttgagcccaggagtttgagaccggcctggccaacatggcaaaacctcgtctctacaaaaaatacaaaagttagccaggcttagtgacacacatctgtagtccctgatactcaggaagctgaggtaggaggattgcttcagcccaggagatcaaggctgaagtgagagatgatcatgctacactgcactccagcttgggcaagagaatgaccctgtctcaaaaaaaaaaaaaaaaaaaaaaaaaaaaaaaaaaaaaaaaaggaaaaggaaaaagaaaaagaaaataaagaatatatattatttatcccgaaatatacaaagtgttgtcatttgcacaagttgtcaatgtaaaacaattatttatgagctatcagacactctcttttcataatgagtccctttggagtagccgtatttcaagggctcagcagccacacagggccattgggaatttgtttgcaagaattaattagggggagagagagagagagagagagtgtgtgtgtgtgtgaatacactcagcacaactgttatttataactgcaagattggaaaacacaacaaaaagagaaacaggaagcttgcactttgtgtgtgtgtgtgtgtgtgtgtgtgtgtgtattttagagtcagagtcttgctgtctcccaggctagagtgcagtggcatgaccatggctcactgcagtcttgaactcctggcttcaagcacctctcccacctcagcctccagagtagctggaactgcagcacaccaccacgcctggctaattttattttttgtagagatggggtcttgttatgttgcccaggctggtctcaaactcctgggctcaagtgatcctccttccttggcctcccaaaatgcagggattgcaggcgtgagccatcatgcccgatgaagctgacacttttctaagtcgttgtggataaccacaggtgaaattcttgtaaaaatgaagattcatataccatataacccacccatttaaagtgcacaactcaatggctgttagttcattcagagttgtgtgaccaacaccacgattgattttaaaacattttcatcacctcaaaaagaaatcccacactgcttagccatcaccctccaaccctctaatctccccccagcccccggcaaccactaatctgctttctgtctctacggacttccccattctggacatttcatatgaatggagtcatacaatatgttgttcctttgtgtctggcttctttcactcagcatcatttgttcagtgttgtgtggcaagtgtcatccaatactctgttccatttatttagagacagagtctcgctctgtcacccaggctggggtgcagtggcacaatctcagctcactgcaacctctgcctcccgagttcaaggagttctccgagttcacctgcctcagcctcccgagtagctgggattacaggcacccaccgccacacccagttatttttgtatttttagtacagacagggtttcaccatgttggccaggctggtctcaaactcctgacctcaggagtttgcctgcccatctgcccatctcggtctcctaaagtgctgggatttcaggtgtgagccactgcacccagcctccattctttttatggctgagcaatgttccatggaatggataaatcaaattttctttatccattcatcagttgatggacatttgggttgtttgcacttttgggctatcatgaatatgctaggaacataggagcatgatggatatgctgtgtgcaaatttctatgtagacatatgttttcatttctcttgggcagacacttttaggagaggaatcccggggcacatggtaactctatgttgagtcatttgaggggctgaagggatgcttttagcaatggtcaacgcagagcaagagtctttcctacttcccacaaagccgctgtaagtgctaaaatggagttaggttctggacccagatcattgtagactgatttttcaacagtgtcacaggctggatggcttagataacagaaatctattttctcccagttccagagtctggaagtccaagatcaaagtgccatccgggttagtcttttacatttgcccaataaccaagcaagtcactttgtctcttcatggctctgtggccccagtttatcgtgaggttgtgaggatttaagcgggatgtgtgtgtgtgtgtgtgtgtgtgtgtgtgtgtgtgtgtgtgtgttggaacagtgcctggccctgagtgttactgggacaaagatttcattctcaccgtgggacaggatgaggtggcacgctggaatgcagaggggactccccaggagagcgtctggtttataagaggacccaaaggtacagaggctgaattatgtctctttaaaattcatatgttggagcctgggtgtggtggctcacgcgtgtaatcccatcattctgggaggctgaggcaggtggattgcttgtggtcaggagttcgagaccagcctggccaacatggcgaaaccccatctctactaaaaatacaaaaattagccaggtgtgatggtgagtggctggaatcccagctattcaggaggctgaggcaggagaaccgcttgaacctggaaggcggaggttgcagtgagctgagattgtaccactgaactccagcctgggtgacaggcatgactgtctctaaataaataaataaaataaaataaaataaaataaaataaaataaaataaaataaaattcatatgttgggctgtgtgtggtggctcacacctgtaatcccagcactttgggaggttaaggcaggcagatcacttgaggccaggagttcaagaccagcctgcccaacatggtgaaaccccatctctaccaaaaataccaaaattagctggtcatggccaggcatggtggctcatgcctgtaatcccagcactttgggaggctgaagtgggtggatcatgaggtcaggagatcaagaccatcctggctaacacagtgaaaccccgtctctactaaaaatacgcaaaattagccaggtgtggtggtgggcacctgtagtcccagccacttgggaggctgaggcaggagaatggtgtgaacccgggaggcagagcttgcagtgagccgagattgcgccactgcactccagcctgggcaacagagtgagactcccgtctgaaaaaaaaaaaaagaaaagaaaaattagctggtcatgttggcaggtgcctgtaatcccagctactcaggaggctgaggtgggaggattgcttgggcctgccaggtcgaggctgcagtgagccatgactgagccactgcactccagcctggatgacagagtaagaccctgtctcaaaaaaaaagaaaaaaaaaaaaaaggatagactatgaaccccaagccctgtgcacagaagatcttacagggaccagccaggcagggacatcaggatccccaacatgtcctgcccagtcccgccctgggcatttcccctggaatcatgatctcttcttaggcagagatgagcctatgactgaccaagccactgcctgtaaggttccaatggaaacagctggaagaaagggcgtaaagcgttcaaggccgggcgtggtggctcacgcctgtaatcccagcactttgggagaccgaggcgggtggatcacatgaggccaggagttcaagaccagcctggacaacatggtgaaaccccgtctctactaaaaatacaaaaattagctgggcctgatggcatgcacttggagtcccagcaactcaggagactgaggtgggaggatcgcttgaaaaaattgttcgaaattcttctccccctcattttgtgttcgagaaaaatacaagtgaatctgcttaactggaaatggcgctattggagcaagggttctctttctttgttttcgttttttttttttcgagacggagtctcactctgttgcccaggctggagtgcagtggcgcaatctcagctcactgcaagctccgcctcccgggttcacgccattctcctccctcagcctcccaagtagctgggactacaggtgcctgccaccacatccggctaattttttaatttttttagtagagacggggtttcaccgtgttagccaggatgatctcaatctcctgacctcgtgatccgcccgcctcagcctcccaaagtgctgggattacaggtgtgagccaccgcccccggccagagcaagggttctcaaagtgtggtctggggacctctacgggttgcaaggacattccagggcatccatcagataaaaaccattttcataatactaaaccattatttgtcttttcactcttactctcttaccagtgttcagtggaattttccagaggctacatgccgtgccgtattgcagctgactgaaccaggaggcaggtcaaggattgttgagccagatatcaaagtgagttgaaaaacaccaaaatactacagtgccactcttctcactaactttgttttgttttgggaaatatatctatttttagggctaggcaaggtggctcatacctgttatcccagtactttgggagaccaagacaggaggattgcctgagcccaggagttcgagaccagcctggacaacataaggagaccccatctctacaaaaaatacgagaaaaattagtcagttgtggtggcccatgcctgtaataccagctactggggaggctgaggtaggagaattgcttgaacctgggaggtttgaggctgcagtgaaccatgattgtgccaccgcacttcagcctgggaaacagagtgagaccctgtctcaaaaaaaaaaaacctatttatatatgttatctacatgagtgtgtaacatgtttgttactaggcaggagattttcaggctccagatggccctacttggctggtcaccgttagatcttacgtgcacggggcctggggctcagggtctattcttttctctctctctcgttttttttttttttttttttttgagacagggtcttactctgtcacccaggtggggtgcaatggctcaatcatggctcactatttttgaaagggttaacaaataccatattcttttaatttatcaggagagattcctaatagagtaaatatcgacacatataacccacataaacaaacgctctttagggtccttgataattcttaataatttgagaggtcctgagaccaaatcgttggagaatatacatactcgagaatataacacaatgttccctagggcccaaaacagaaaaaccatatttttcagccgggcgtgtgtgtgcgtgcgtgtgtgtgtgcatgtgtgtgtgtgcgtgtgtgtgtgcatgtgtgtgtgcgtgtgtgtgtgcatgtgtgtgtgtgcgtgtttctccagcaagttacagttgaatcatgggagttaggtgcactgcagactcatctcccatctcccctccgttgtctttctgctcctctcttttcgcctcagagcagtgttgccagggaaaccagatcagcacatcctcaacacaaaatcaatttacctcccgtgtgtctggagggtgacgaatggcaggtctgcctttcaacacgtttacatccaaggagctgtcaactccgcctgcctccacgtcttagaaatgccattttatcttcatccccctctcccattccttttcacttttcattttgtgatggctgtccttttattttcatgtgttcctgcaaaatgtgcattgctgtttgggggcatctaggctaaatttgcataacttgttttccatgatctatctctttttgtttctcatggtttttgtgtgtgtgtgtgtgtgtgtgtgtgtgtgtgtgtgtgtgtgtgtgcggttttctttctttttttttttttttagcactcagcagtaacgtgtctaagattgatcccagttctgtatcttgctggtaatttcacctgctgaatggggctgcatggttgttaaacattgctgcaagttctttaactctgctgagaggtgagatctacctcctctttccttgaagctgaatctgggtgagtttgtgactacctcaactgctagtgtacatccacttgctctgtgtctttcaaggttagctggatgctaggtgacttccaaggttagttataaaaggcttttgcctggttcttctggaataattactgcttggaacttagctgccatgccgtgaggaagcccaactcacatggagagctctgcatgtaggtgctcaagtcaacagctccaactaagtccagtcttcaaatcatctcaaaccaggcaccggacatatgagtgatgaagcttccagatgattccagaccctagccattggggtcatcccagctgtggccccacacattatggggccaaaagaagccatcccctttcataactatggacccatggaatctatgggcataatgagatgttgctgctttatgacactaagtgagggttggtttgttacacagcgaaagtaaccagtgcacacccagatccatctcctgctcccacatacacacagcacaaatactctaccataaatgttcttgtacacattttcttatgatgttgaatgagaatgagacactgagactgcccttggcataggtcccaggagcagaattgcttgggtctgcatattcctttatttatttatttatttttgtcaccgagtgacagtagccatcatggctcacaacagccttgacttcctgcactcaggtgatcctcttgccttagcctcctgggtagctgagactacaggtatgcaccaccacgtcttgcttattttaaaaaaatttttgtagagatagggtctcactatgttgtctgggctggtctcgaactcctgggctcaagcaattctccttcctaagcctctcaaagtgccggattacagcatgggccactgcgcctgactagggtctgcgtattcctaactctaccaagtcctacaagtcactcagtgcaatgaatgtccctatttgctcacatatgaggattcctgtgcccccagtgcccactcccacctctggagattgtccaggcttctaggatttgcccatctcatgggcataaggtggtagctcattgttctccaactacaaatgagtttgcacatctcttttttagtttatttggaaatccccttctttaaatatcctgttcatagtgttttcccattttctcattgctgtttgtgcttttaccaccacaactgttgactttttttttttttttagacagtctcgctctgttgcacaggctggagtgcagtggcactatctcggctcactataagctctgcctcctgggttcacgccgttctcctgcctcagcctcctgagtagctggaactacaggcgcccgccaccacacccggctaattttttgtatttttagtagagacagggtttcactgtgttagccaggatggtctcgatctcctgacctgtgatccgcccgccttggcctcccaaagtgctgggattacaggcgtgagccaccgcacccggctaattgttgacttttttgaacagagcccaatgcaattcctaaaggtattttagctctttctgttgctccaataatatattgttaaatgtgaataacatttctataatacaaagaggatagtataacatggtgctcagtaaatcttgtattgaacagatggaggaagaaaggaaaggaggaattataacatcacacacaccatgccaagggatgatcttatgccagacattggctagaatagcctttaatatattgcttcatttaatcttcaccacagtcatgtaaagccagccccattattatctctatttcccagatgagaaatctgaggctgtgtgtgtgtgcacacacacgcagggtggaaggtcttttacaactgggaagtggtgagacatcaatttgacctcaggtctctgtgactccaaacctctgattcttttgtttgtttgtttgtttgtttttgagatggagtcttgctctgtgagcaggctggagcgcagtcgcgtgatctcggctcactgcaacctccgcctcctgggttcaagtgattctcctgcctcagcctcccaagtagctgggattacagccacctgccaccacgtccagctaacttttgtatttttagtagagacggggtttcaccatgttggccaggatggtctcgatctcttgacctcataatctgcccgctttggcctcccaaagtgctgggattacaggcgtgaaccaccgtgtctggctccaaacctctgattctaacagggatactaggcagactttcagcagcaccatccctcctcagcactcattcattcatttgttcatttaatcatttagcaaacacaaagaacccacacgtgtgggatatgactgtgactacatcagaccagggcctggctgacatcatagggagatcagatatgaaccactaataactacgaattcataatgatgaaaagagtgaataaattacttcacagactttctgtggattttcatgtgatgatgaaaaacagtgagctgggtcccaatgtatttcctggcaactggccatgttctattgttgcagagaagcaagatataggatgaagtgtatcagtgattccattcacactagagcggaccatgaaatatggatttcaaccttagtcaagcctcatcatgttccaccttagaaaatgctaaaaaatgttaacccactatttgcaaaagaaaacaaaaagctgggctgggcgcagtggctcacgcctgtaattccaacactttgggaggccgaggccggtggatcacctgaggtcaggagttcgagactagcctggccaacatggcgaaaccccatctttactaaaaaagcaaaagttagccgggcatgatggtgggtgcctgcaatcccagctacacagggggctgcggcagaagaatcacttaaaccccagaaagtagaggttgcagtgagctgagatcgcaccactgcactccagcctgagcgacagaatgagactctgtctcaaaacacacacacacacacacacacacacacacacacacacacacaaatgaaaaacaataaaagcaagcattcagtaagatgtgacatgcaccaaggaggagacacatgaggtgctgtaggacgagtaatggctctggggggccggaggggttgtgagaaacaaaatcaaggtcccaagggataaaacccactcctggggcggggccccgcggctcacgcctgtaatcccagcactttgggaggccgaggagggcggatcacttgaggtcaggagtttgagaccagcctggcaaacatggtaaaaccccgtcttagtaaaaatacaaaaattagctgggcacggcgcgggcacctgtaatcccagctattcaggaggctgaggcaggagaatcacttgaacccagaaggtggagattgtagtgagccaagatcgtgccactgctgcactccagcctggatgacaagagggaagctccgttaaaacaaaacaaaacaaaacaaaaaaaacaccactcctgggaggaaacagctagtgacccaagttgaccagggtctgctttaagacaaggaatgaagaggtctccaaagaccagagtatcccaggggaccacataaaaaagtctttagtttttcaaatagtttgcatgactggacccttgggacaccggcctgagaaggaaggaattagtcaagagatggacaatgccagaaaaagcttttccttggaaaaagaccctggtttaagttcaagatagcctcatgagtaaagaagcaagacacaaaagtgtacatcttttttttttttgagatgggagttttgctcttgttgcccaggtgggagtgcaatggcacaatctcaactcaccacgacctccgcctcctgggttcaagtaattctgctgcctcagcctcccgagtagctgggattgcaagcatgcacctccatgcctggctaattttgtatttttagtagagacggggtttctccatgttggtcaggctggtctcaaactcccaacttcaggtgatccacccgcctcggcctcccaaagtgctaagattacaggtgtgagccaccgcacttagctaaaagcatacatctttctatgattccatttgtatgacattctaggacaggcaaaactataacctatggtggaaaaaaatcagagcagtgcttgcctctggagttcggggactggctggaaaggaacatgcaggaactttctgggatgatggggtgttcggtattttttttttttttttgagatggagtctcactctgtcacccaggctggagtgcagtggagcgatctcagctcacactgcaacctcagcctcccggcctcaagcaattctcccacctcagcctcctgagtagctgggatgacaggcacaccatcacacccagctaatttttgtatgtttttgtagagacaggcttctgccatgttgcccaagctagtctcaaactcatggactcaagcagtcctcccgcctcggcctcccaaagtactgggattacaggcatgagcccccgtacctggcctgagttctgtattttgacaggcatttggtttttcaggggtatgtatttgtcaaaactcagtgaatttatacctgagatctgtgcattttattgtgtgtattttacattcttctctcaaaagaacaaatattaaaccttagttaatgatatgaagcattaagagggcagtggacagataatctataatttattttgaaatgcacaagaaaagatggcttgatggatatgggatacagccacacctgtgatacagcaggcatgataaaatgtcaatggtagaatctaggaggtggggataggggcgcttgttgtgaaatctttcaactttgctctatgtttgaaagtttttgtaataaagtgttggaaggactgtagtaaaattgttttttgtttgtttgtttgttttgagatagagtcttgctctgtcacctaggctggagtgcagtggcatgatctctgctcactgcaaggttcgcctcctgggttcacgccattctcctgcctcagcctcccaagtagctgggactacaggtgcccaccaccacgcccagctaattttttgtatttttagtagagacggggtttcaccgtattagccaggatggtctcgatctcctgacctcgtgatccgcccgcctcggcctcccaaagtgctgggattacaggcatgagccacagcgcccagcctgtagtaaaattgtttaaaaagatgatactgggccgggcacggtggctcacgcctgtaatcccagcactttgggaggccaaggcagttggatcgtctgaggtcaggagttcgagaccaacctggccaacatggtgaaaccccatctctactaaaaatacaaaaattagccaggcatggtggtgggagcctgtaatcccagcaacttgggaggctgaggcaggagaattgcttgaacctgggagacggaggttgcagtgagctgagatcatgccactgctctccaccctgggctacagagcaagactccgtctcaaaaaaaaaaaaaaaaaagatgatactgggtaccaagagggtgggggctggcaccatggggatctgagtattagggagaggagaccaagttcagttactgcagggaaaaatgcttattgagcatctactgtgtgccaaaccatgttctaggtactggggacatagcatcaaacaaaacacaaaaatccctgccctcatggaactgatgtcacaggtgacatggataagtgataaaatatatatatatatatatatatatatatatatatatatatatatatatatatatatatatatatatagtggctgggcacagtgactcatgcctgtaatcccagcactttgcgaggccaaggtgggcagatcacttgagcccaggagttcaaaaccagcctgggcaacatggtgaaaccccatctctactaaacaatacaaaaattagctgggcctggtggcacacacctgtagccccatctactcaggaggctgaggtgggagaatagcttgagccgaggaggtcaaggctgcagtgagccaagattgcaccactgcactccagccctggggacagagcggggctctgtctgtctctctctctctctctatatatatatatgtgtgtgtgtgtgtgtgtgtgtgtgtgtgtatacgtgtatatatatatatacacacgtatatatgtatgtgtatatatatatatatatatatttgaagaaataaactacataacatgtcaagtgtaagtgccaaggtaatattaacatggtgtaaagtgggtgcaggggtgctcaaagaggatctcagtgagaaggtgacacaggagcagagagcagaaggaactgaggggcaagacatggggagacaaggtacagtgtgcagtaagtactaaggcacttaggggagcttggcccattggagagtcaaaagaacaatgcaggaatgggaggcattcagggccctactgctctgataaaaacgtttcgttttgctgtgggtgagatgggagccatgggttggttttgagttttcgtgtggatgttatctattgcaataaaacatgccacccccaaaactttgtgggttaaagcagtggcagtatattttttctcttgattttgcaatcaggactgggttcagctggctggttcttctgcttgatgggcttccattagggtagggatgtccaagatggttccttcacttaagatgtctggcacctcggatgggatgattctaatggctggggactgtctggcatctctttcttcacacagcctgtccacatggctgacttgggcttcctcataccatggcaggatcacaggggtcaggcttcttacatggtgttaaagcaaactaaatatggcccgagaaggattctatacttctatttttgagtccttgtggacaagctataacctagcttaataggcagacaagatcgaaaacctaattcaaactgtgttcaaataaggcaaacaccaacatgtaaccaatcctgctgtttctgtacctcactgctgatttttgtatgtcacttcccgtttttgtgtgtgtgtgtgtgtgttttggcgatggagtcttgcactgtcgccaggctgtagtgcagtggcgcgatctcagctcactgcaacctccgcctcccaggttcaaggattctcctgcctcagcctcctgagtagctgggactacaggcatgcaccaccacgcccagctaatttttttatttttagtagagatggagtttcaccatgttggccaggatggtctccacctcttgacctcgtgatccacccgccttggccttccaaagtgctgggattacaggtgtgagccactgcgcccagccacttccctttttttttaatctataaatttgttctgaccaggaggcatccctggagtctctctgaatctgctgtgattctgggggctgcccaattcacaaattgttcattgttcaattaaactttaaatttaattcagctgaagttttaaacaatggcggctggcttctaacagggaggcggtgaatcctgccatgtctcttaagggctacacctggaacttgtatcacatcatttgtgctgaattctattggtccaaccaagtcgtaaggctagcccagattcaagctgaggagaaagagatcccatctcttgatgggaaaggtagtgggctcatagggcaggagaactgatagcaatcgtcttggataccatgccccacagtgtgccctgtggcaacagctggcagagaaaagacctgaagagtctaaatctgtgtttctctggaatggacacaaccatctctgcccctgggacgccacaagagcatcagccaagggctcagctatgagatgggcacttttgtaatccagagatggcagcaacaatattcattatttttaactcaaggaggattaaattcagttcccaaattcatggttatggtttcagacaacaggattttcttttttattttattttattttattttttgaggtggagtctcactctgtcacccaggctggagggcagtggtgtgatcttggcttactgcaacctctgcctctcgggttcaagcaattctcctgactcagcctcctaagtagctgggattacaggcacatgccaccacgcccaactaatttttctatttttagtagagacagggtttcgccatgttggtcaggctgatctcaaactcctgacctcaagtgatccacccgccttggcctcccaaagtgctgggattacaagcatgagccaccgcacccagcccagacagcaggatttttgatgaaatcgccccagaaaactggagtcttgactccaaattagcctttaccttcccagggagaggacgagtggggacattattgcttctaaagtggggagctgggggatggggcaggggcatacaagagatggggacagggcttggtgtgggagggatatttgcagtgctgttgcctgggctcaccccacccccagcccctgctgtcacttacaaccttcggctggttaattacctgttggggccttcacttatgtacctgaaaatagggatctcgttctcttagcattgtcatgaaaacctctataagtcagtggttcccaatctggctgcacttttggaatcacttaggggaagatttgcaaaataccgatgccctggctccactcccagggactctgattccgctgttttggggtgtggcctgaagattgggatctttaagcactcccaagtgattctaacatacaagccaggctaaggaccactaggccaagccaccgggccagggcgttctgagccggcgctttagccagcggtcctgcagcgccccctggtggggaacacgagcgcgtcgcctgttgtctgtggaactctccttcctccctcctagccgcgtgtctcgggcgctcctctccctgcttgaaccgccggaggggcttgagcattcagcccctggggatggtgttgtagggaccagcgcgacatcgggtctaacccgcccgagggacaagggggtggcaatcagaggggccgacagaccggggttcgagctcttccccacctctgagcctcagtttcctcatctgagaaatgggatgaaaatttgacttcatgttgctccccagtgtcagccccgggagggtgcctgcccgacttccaccagggggccagaacctgaacaagagtggggacagttaggtgaggaagtgggatatatccaaacgtaaatgttttctatttatttatgtatgtatttagaaacggagtctgcctctgtcgcccaggctggagtgcagtggcctgatctcagctcactgcaagctccgcctcccaggctcaagccatcctctcacctcagcctcctgcccaactggaactacaggcgcgcgccaacacgcaagctaatttttgtattattagtagagacggggtttcaccatgttgggcaggctggtctcgaactcttgacctcaagtgatctgcctgcctcggcctcccaaagtgctgggattataggcatgagctgcccacctggccatgttttccatttaaaatcctcgttttagtttgcaattctctcccacccattctttggttttatgttttcctttcttcacattggtttcatttttgtgtttgtttttactcattttgcatttatttggttttggctacatgagaagctggtgaccctgtatttgggaagtccccaatatgtgaggattatactgaaggtgacacccaaaatttgggagcatgctgaggatgggtccttgcagagactgagggcaggggttgtcgggttcaaggtgtggccgtgggctcctgtcagctagtgtcacagtcacactaataggcacacacctacacacacagacttacacaggtgccaacacactcacaaaacacacaatcatgctcacactcctagtcacattctaacacacacatccagatacaccgacatgttcacacacacttgcacatccagcataccgattcacacacctttgcacacacatatgccacacccactgaaaccctctcacatgtccacacacaccatcaccccgaccctgacacacactcacacacacacactgacacgtcccctcccctagtccacccctaatcctggccacacaaatgcccattctttctccccaggatggggccaaatggtgttttcttggtcatccttggccgacctggcggcctgtcccaggcagccggacttactggaatctctgggctgtggtgtgcacaggagaactccagatggggcccccagtgaggaaggcctgaatgaggtggggcatctggctggagaccatcctttcctcccttagaccacaagagggcgaggccctccctctcctccgagccaggggcttcgccctggtattcccccacccatggccccaccccttatccaggcgcctccttatccccctctcagccctaggtctcccatccccagtcttcccccatcccacccatttcacccatggcagcacaaatttgcccctgttcctccccctgcctggaacctgctatggctccccagtgccctcaagacaacacccagcccttcaccatgtgctccagatctggaaagaaagctctggccaacccttctccctggtttcatccagtctaaagcacgtggactgggtcgggtgtccccttggggttgtcagttctctctcccccactggactttgagtcccaagagggcaggtccagtattgtcatggtcactgctgggtctccagtatggagaaggggctcgagaaggtttattaaacaaaagaaagggccgtgcgccgtggctcacacctataatcccagcactctgtgaggccgaggctggtggattacctgaggtcaggagtttgagaccaccctggccaacatggtgaaaccctgtctctactaaaaatacaaaaaatgagccgggtgtggtggcgcacgcctgtagtcccaactactcgggaggctgaggcaggagaattgcttgaacccaggaggtggagattgcagtgagccaatatcgtgccattgcactccagcctgggtggtgacagagcgagactccgtcttaccaaaaaaaaaaaagaatgaattcacgtaactgtttaaagggtggatgtattttccttttcccagagctgtggctcctcatgcccactagagggcagaaaaaatctagaattcaatgcatctaccatgtgtcctccctccaccaccaaaacgtgccccctccgcccccacctaaggagaaaggaataacaataacaatgtgaataactgctaatatcagccctactgcttgtcagacccctgttaagtgcttcacacacctgatctctaaatcaactgctagatgagacccagccaaggtagaggaggaggaaagcaaggatcagggagggtgtttaattttcccaagtcgcacagcatccaaactgcagataaacttccagctcaagcctctgtgacttcacagctctttgtcctgtttgtggcaaagtttctcaaaagagagagtggtgactgggtgttagaccccttgatgaggatggaggggggcagctcatgcaaagggggcctctagccaggcagccctccccactgccactgcccggggagcctgcacactttaaggcagattcttcatagccttaggggctaacctctgaaagtgtcacagcagcccagggatgcgggttctattattttatccctgtgatacagattaggaaactgaagctcaggaaaattgagggacctgtcctgggtcgcgagacatggaggtggcagaactgagatttaccctgcaaggggccttgccagggcaggacacagagacttcaaatgctaggaggaggaaatggaactccttccccagaagagggaaaagtaactacagggtgagggtctgggagaggagaacaaggacctattttctgatgaggaaagggcaggcttttgtaggtctgtatcccaggtttaggggagcccagggaacctcaaggtcttggaaattcttattttaaaaagaccctgaggtcaggcgccagtggctcgcgcctgtaatcccagcactttgggaggccaaggcaggtggactgcctaagatcaggagtttgagaccagcctggccaacacggcaaaaccctatccctactaaaaatacaaaaattagctgggcatggtggtgcacacctgtagttccaactacttgggaggctgaggcaggagaatcgcttgaacccgggaggtggaagttgcagtgagctgagatcgtgccactgcactccagcctggggtgcaagacacagcaagactctgtctcaaaaaaaaacaaaaacaaaaacaaaacaaaaaacaaaactgaagggtgcagactgaggaagagggaagtaacagtcaaattgtgcatttattagaaaaaacaatctaggtccctttggggaggctggaaaaaatgcccaggtaatagtaagtgaagaaaaaaaaaactggtagaaatatgtacatagaatgagtccattttggttaaataaataaattcataaagctaacatttattgcctcctaagacaggccagggattgtctgaatattttacaagggcttttgtcactaatcccataactctgaacgagtcccattttacaggcacagaggttgcacagagcccaggaatggcaaagtgaggtggcaaaccaaggtcttctgagcccagagcccaggctctcaacccctgtgccctgtgcagatcaccctgaacttgctcaatgtaccagccgtcatttcttcatagcagccccaaataaatacctaactgttcaattcctcatcaggtgaggtctaaacaacccaagtatttatgtcctaagaacttagtagccatggccgggtgcagtggcttggcctgtaatcccagctctttgggaggaaaggcaggcggatcacttcaggtcaggagtttgagaccagcctggccaacatggtgaaacctgggtgtgatggcgggcgcctgtaatcccagctactcaggaggctgaggcaggagaattgtttgaacctgggaggcagaggttgcagtgagccaagactgcaccactgcactctagcctgggtgacagagcaagactccatctcaaaaaaaataataataatacacttttttcaatttatgtgatgaaaatatttgatatgatgaggagacagttttcaaaaacacttttggtagcaccaaaacaaagtttgaagtcctctatcctggggccttgcggcttcttttctttcttttttttttttgagatgaagtctcaccctgttgcccaggctggagtgcaatgctacaatctcggctcactgcaaactctgcctcccgggttcaagcaattctcctgccctagcctccctagtagctgggattacaggagcatgccaccaagcccagctaattttttgtgtgtctttagtagagatggggtttcatcatgttggccaggctggtcttgaactcctgacctcgtgatctgcccgcctcggcctcccaaagtgctgggattacaggcgtgaaccactgtgcccggccgggccttgcattttctataaatgttcttacttagtttaaagcgagacgggagcgcaggacccagtcctgggaggaaatgaagtctcagagggaactggcaggcaaagcttataaagaccacagtgattatgccaaggtcaaggaaagggttggggagggcggggcaggctccaccttttgagcagggcagcggggaactcccccagccatctctgcgccccacagggatactcacacattaacacgcgtgtgtacaatgagactgtctgccatacaaatggcatcgtattctacgcgctgaggactgctgtaacaaactatcacagaatgggtggcttcaatgacagaaattaactttttcacaattctggaggccagaagtccaaaatcaaggtgttggataggttggtgtctcctgaggcctctctccttggctgtgcagacggccgtcttctccctgtatcctcacatggtcttccctctgcatggggctgtgtcctggtccccttttctcataaagacaccagtcaggttggattaagggcccacacatgggacctcattttactttttttttgtttgtttttgaaccaaagtttcgctcttgttgcccaggctggagtgcaatggcatgatctcggctcactgcaacctcctcctccctagttcaaacagttctcctgcctcagcctcccaaggagctgggatcacaggcatatgccgccacgccaggcaaattttgtatttttagtagagatagggtttcaccatgttgggcaggctggtctcgaactcctgacctcaggtatctgcccgcctcagcttcccaaagtgctgggattacagctgtgagccaccaaagcacccggcctcattttaccttaattacctctttaaagacccccatctccaaatacagtcacattcagaggtgctgggagttaagacttcaacatatgaatttggggatggcgatagcatagtatatggtaactctatgttaaacttccagaggaactgtggccacaggtaactctttaacagaaacttgcctgtgttttctttgtactcattctgccttctggagaattcctaggaacccggacaaaggtagttgggcacagtggcacatgactgtagtcaaacctactcaagaggctgagatgaagaatgccttgagccctgtagtttgagtccagcctgggctacacagcaagacccccatctctaaaaaaacaaagacaaagctaacctacaaattgttctcaaatgtaaagacacggaggctgggcatggtggctcacgcctgtaatccccaggccaaggtgggaggattgcttgaggccaagagtttgaaatcagcctgcgcaacatagggagacccatctctataaaaataaaaaaattagccaggtgtggtggtgcatgccttcggtcacagctacttgggatgctgaggtgggaggatcacgtgggcccaggaggttgaggctgcagtgagctgtgatcgtaccactgcacttcagcctgggtgatagagcaagaccctgtctcaaaaaaaaaaaaaaaaaaaaaaaaaaaaaaaaagacatgatagaaatatttaacaattacttgacttgatttactatgaaatatttaatgatgtattagttaactgtgattttgccagtttcttctgtattttgaaactgatactttttttctggttcaaaaatttttggaaggtgcttaagaaataactgttcctccccactgggcctgtggagacctgtagacaaagtactaaagtaactcagcacaaatgtgcaaagtctgtaaatttgggtctttgattttcatagctatgaagagctcagcatgactcttggtggttaagaggcaaattttgctatatttcctcttcctgctgcagctgtactattaataaaatcattctgaacagctttcctgaaatgtaaaaataagccaagatgtctattttgtggatttttttttattatatgtataagcacaggaaaaaacaaatctggtaggacctgcatcaaaaggttagcagggttcctctctgggctgggggcttaagggaggggtgtctgcttcagccatatattgctgttcacaacccgctagagtttaggggcttcaaacaatgacttactagcattcagagggttgactgcgtggttctgctgctggtctctccctcggtcacttgtgtggctaatgtcagctggtaataggctgattctcccccacacagcctctctgcattcacctgggctttcactattttgtaacccagctttagcttccttgcaagatggcagctggcatgcacgtgagtaagagtgggagtctcctggactcttaaggcctaggcttgaaattgacgcatcactctgctacattctattggtcaaaacaagtcacgaggcctgcccagaatggaggggaggggaagtagacccccctggtgatgggaggagtgatgcgtgtgtacagggaagggaggaattgttagtagccatctttgaaggctgctgacctccgtgtctttctttctgtgtttaatagtatgcctagaataataataccacctagaatattatataataatgcctagaatattatagaaaaataatatcagacgtattatttttatgatgatagatatttttttaaataatgcaataaattgtgggaaacttgttggttggaccaagaatctacagaaataagtgaaacctggctggacgcggtgactcatgtctgtaatcccagcactttgagaggctgaggtgggcagatcacttgagatcaggggttcaggaccagccttggccaacatggtgaaaaccgtctctactaaaaatacaaaaattagccaggcatggtggcaggcaattgtaattccagctacttgggacgcagaggtggaagaatcgcttaaacccgggaggcggaggttgcagtgagccgagatcgcgccagccactgcactccagcctggacgatggagcgagactctgtccctgtcccgccccctccaaaaaaaagacacagcaaaagaaaagacacagagaagaagagaaggccagagactggagccaagagacatcaagagcccccagaagctggaggaggcaagaaaggattctcccatagaaccttcagagccaacaaggccctgctggcatctttgttttgaacatctggcctccggaactgtgagaaaataagcgtctgttatttttagccaccaagtttgtgagaatttatgacagcagctctagaaaatgaacacagacatagacagagagagggagactgatctgaatgtagatggagatgtggatatagttgcagatagaggataagctaccaataaggatatagcagcccctatggtgtaggtatagattaggatagagctgtgggcgtagacatggatatagacataaacatcaatgtagacatagatattactgtggatatagacatagaaggagataaaatagaccttgaagggccgggcacggtggctcacgcctgtaatcccagcactttgggaggctgaggtgggcggatcacctgaagttaggagttcgagaccagcctggccaacatggtgaaaccccatctctactaaaaacacaaaaattagccagacgtggtggcccacgcctgtagtcccagctactcgggaggctgaggcaagagaatcacttgaacccgggagacgggggttgcagtgagccaagatcgcaccactgcactccagcctaggcaacagagcaagactccatctcaaaaacaacaaacaaaccgaaaaaacagaccttgaggaaagcttgaggaaggaatggggtcacctgggctaactatgggccattgccaacaggaggtcacagcagatgtcatggagacagcctcctacaaacgctccacagctaagctcttcaggttttctggaaaatcccaagtatcagaaattgctttcttggttgggcacagtggctaatgcctgtaatcccaacaccttgggaggccaagacaggaagattgcttgaggccaggagttcaagaccagcctgggcaacatagcaagacctgtctcttaaaaaaaaaaaaaaaaaaaaaagctttctttcactcctccagtcatcctgctcttttctagtttctggataatcaatttgacccccaaaatgtgaaaacacaattcattgttttcagtcaaaagttgtatttttcttttctttttgagacagagtcttgctctgttgcccagactggagtgcaatggcgtgattatggctcactgtagccttgacctcctggcctgtagtgatcctcccgtgttagtctgccaaggagctgggattacaggtgtgagccagggcacccagacttcagtatgaagttttctctcccttctcttacctttctcatataaatcctgttttgcttttgaacgttgacaacagtcctatgaccatctccctcccctttgcatgccagtgtccaaaacaaaatcagatccaatgaataaatatttaaaagtttgttgtcattaaaaaaaagtggggacagggcacaatccaggagacctcaacccaggtagtaagaagctcagaggcatgttgttacaggatggctgagaaagcaaaaatcaggaagtggtttaacctttacagtgactgtctatacagtggaggtttccagattgcacgggactggttaaaagcaatcctcttatatcatttggggaaggcaacttaagtttcgtttatgattatcagaggcatttgtaagaaataacctaagctggctgggtgcggtggctcacccctgtaatcccagcactttgggagactgaggcagacagatcacttgaggtcaggagtttgagaccagcctgagcaacatggtgaaaccccgtctctactaaaaaaaaaaaaatacaaaatacaaaaattagcagggcgtggtggtgcgtgcctgtaatcccagctacttggcaggctgaagcacaagaattgcttgaaccccggagatggaggctgcagtgagcagagatcatgccactatactccagcctgggtcacagagcaagattccatgaaagaaagaaagaaagaaagaaagagagaaaggaaaggagaaaggaaagaaagggagagagatagccgggcgtggtggctcacgcctgtaatcccagcactttgggaggccaaggtgggcggatcacgaggtcaggagattgagaccatcctggctaacatggtgaaaccccgtctctattaaatatacaaaaaattaggtggcgggcgcctgtagttccagctactcgggaggctgaagcaggagaatggcgtgaacccagaaggcggaacttgcagtgagccgagatcgcaccactgaactccagcctgggcgacagagccagactccatctcagaaaaaaaaaaaaaaaacaagggagagagattgagagagagatcgagatctaagttgagtttcgcttacattcaaaagtcagagtaccttaggttttgcttatgtggcctgattttgtcttcttggggaattctcagtccggatccaccccccctagttttgtgtgtgtgtgtgtgaaacagggtctcgctcggttgcccaggctggagtgaatggcacgatcgcagctcactgtagccttaacctcctgtgctcaggtgatcctgttgcctcagcctcgcaagtagctgggaccacaggcatgcaccactttgtgcagctaatttttttttttttacttttatagagatggagtcttgccatgttgcccaggctggtctcaaactcctgggctcaaggatcctcccaatttggcctcccaaagtgttgagattacaggtgtgagccactgcgcctggctccccccattttattttaacaactttccccttttgacatagcaagctgagggggtaatgaaatcgtatagcattactttctgggagtgctattggctgggacagatgggtgtatagtcatttttgatagctgcatagtcatcttagacatatgtggtagagtccttaggttctccaagttgtctaatgcagatgggtgtcattagttgcatcagtggctgttgagaggcattggaaacccttaagaggatgcaactcccagggaggttaatatcatgactaggaggagaataatatagccaagggttggaaaattcaccagaggagagattcccaggagccaagatgtaaccaactaaataaataaatggaaaaagtatcacctatctgataagatttacatctgttctttaaaatcctctgaagtgtgggcaaaaattcttgatatattaacacagaaatgacagcttcattcattatacctcctttttgggcagttagagtagctcagactcatacattttgtgaaattattgaagcaaggctagaaacctcggtttgtaagccttggaggaaattaacagtgtcattgaagtttttttctaaagttttagagcatttataatagccccttccttccttccttctttttctttttctgtttctgtttttgttttttgatatggagtcttgctctcttgcccaggctggagtgcaggagtgcagtggcatgatcttggaccactgcaacctccccttcctgggttcaagcaattctcctgcctcagcctcccaagtacctaggactacaggtgtgcaccaccacacccagctaattttagtatttttagtagagacgaagtttcaccatgttggccaggctggcattgaactccttacctcaagtgatccacccgcctcggcctcccaaagtgctgggattacaggtgtcagccactgtgcctggcccataatagccttttctaaatcagagacaccaatacaaggaattggagctctgtccaccaaaggaagtcagtgtcatgtgtagtgagagggttggtgcttcttggatttctctaacggtgctatcttctgaacaagtgagccaaggttggtggctttatttgtagagatagtttattgtatctgaatattgggagggattactgccaatccataatgaccacgactcctgtttggtgttggctgttgtggctgcccttctcctgtcattttgctcagtgcccgcgcctggcagtgctgtgatgccatcccagggttcccgggtgcccggtacctgacaggtgcattacctggtaggcgcatttctggtgcagtttcttctggtccttgtaccactgcatgagccccttcatgaaggtgattgtcactttgtcgtcctcaagcttgggtccgctgtactcaccctcgatggctggcatgtgaacaggggagacacgagagtcagcgaccacggccactgtaagggggaagggggtcttgctcccagggatgaggtggacctggctctggacacacagattgagagagggacagagcgagtgaagagtcccctctctggtcaggtctggcccagaggcctcttcctgacctccttctcttccttcacccgcccccctttaccctattcagttttatggcacttagcacgattcattttgtgacttgttcatcatcttatctgcctcctagaatatcagctccatgcggacaggaagggttttgttcatagctgtacccccagtgcctaggacagtgcctggcacataggagatgctcaataatcatctgtgggatgaatggctggaccttctcagcacctagaggtgaaccagacacagcctgtgggggcggggctactgccggcagagagggagggaggagaggatgacagagtggccaagaagccagcatggagaagggcccgggcaggggtgatgctggtgggtagggaaggtgtattagtccattttcacattgctgataaagacatacccgagactgggtaattcataaagaataagaggtttaatggactcacagttccatgtggctgaggaggtctcacaatcatggtggaagatgaaaggcacgtctcatgtgccgacaggcaggagagaatgagaaccaagtgaaaggggaaaccccttataaaaccatcagatctcgtgagacttactcactaccacgagaacagtatgggggaaactgcctccacgattcaattatctcccaccaggtctctcccacaacatgtaggaattatgggagttacaattcaagatgagatttgggtggggatgagatttgggtggggacacagccaagccatatcagcggggtgttgcagctcctgacctcgcccattgggaatcatgagacggagctttgggctgcggatggagcgccctggaacacaggcagaggagcgacagacagcagcctgggggcagaacaaggggctacccttgagcccacccccacccccagggaatggagaaggcccgtgtggaatgttctgggctggagcgtggagcatccaggcctgactcactcatgctctcgatgtccagcgagtccaccacggagcgcttgtgctcgtcgcctgcgatggcccgctcaaaggccttctgcttcacgatcttgttgcactcctggtatttcattttggcatccttgtcgtggggcttcaccttgaccacctgggtgggagggaaggggcgtgcacactgaggccgaggtgggggcacagcggctgtccccaggctgcccagccctggattccatgaacgcggaagtcaggctgcccgggcaccagtgctgatggtgcaaccctggacatgtttaacctccaagtcttggtttctgcaccccaaaactgtccatagctaagctgctcacaccggcacacttcatcaaccttagctataactacattaaaatcaaacaccttgcccgtctgaggaccatgggctcagctcctggtcccccgtgggaaccagtgcaggcagcgacaactccaggcttcccagccttggactccaggacttacgccagctgcccctcaaatcctcaggcctttggcttcggactgagaattacaccgttggcttccccagttctgaggccttcggacttgttctgagccacactccctgcatcccagggtctccagcctgcacacagcctcaggacttctccgcctccataattgaatgagccagttgcccaataaaccccttctcctatctctgtctacacatatcctgttgattctgtctctttggagaactctgattaatatgcttcctctatgaaacaaacagggctgttcctagccatctcccagcccctagggagatgaaacgccatggcatacctggccaccgcagggctcaattaagatgagctgtaattattattattattattactttgagatggagtctcactctgtcactcaggctggagtgtagtggcgcaatcttagctcactgcaacctccatattctgggttcaagcaatcctccttcctcagcctcctgagtggctgggattacaggcgcctgacaccacccccagctaatttttgtatttttagtagagatggaggtttcaccatgttggccaggctgatctggaactcctgacctcctgcccacctcagcctcccaaagtgctgggattataggcatgcgccaccgcacctggccaaggtgagttgtcattattcttcttattgttattcccacagccctggagcctggggctctgtgccttctactgcctgccagacagcgaggggcctgggccagcagggccgttctcctccgtgccagctcagtgccaggcccctctggctgcctgcccagccccaggactcctgagagcctggatccggggtcctggggggtaaggggcccctcccaaaggctgctgttgcccggaactctgacgcagcctcagcagcaacccccaagcaggctgctcccatcccagggaagtccaccttccaccccatcacccagctgagactgagcctcatcctggactcctcccgacccctcagcccccacagcccggcagtcacttcacttcttctgccaagtcggcctcctgaacatctctcagatccagccattcccttctcaccctccagccccacccagccctgacctggcctctcctgcccacgttcctggctcagcctccacctggcctcacagcctcttgtcctgcccttccagaggggtgttcctaaggcacaaacctgaccctgtcctttccctactcggaacctcccagggctcccagagcctcccgcagaaagccctggctctccccacggccctgcgtgatctgctccctgcagcttcatcataacccccacgcacacacactgcagccccactcaccgcctccatgctaggctccgctaacctctggaactttgccaccaggttctttctgcctgaaggccaaaaccatcaaccccctagggagacccccaggcatgcgtccagagacccagcatcccccatccctcgtccactatgtcaccccactgtgagagctgaaaggttgtttctgcccattcagggacagagcctaccccaggaggcccactagattctcaggcccaccagggcccatgagtggcaggacccacactgggggactgggagctgtgaccctctaggctaacggggaactatgggagctctgcctggggacacagggccccaggcctgggccagttcaagagatgagtggctggcagctcccagcagatcaccaggctggggacgaaccctgagggtgagagagactcctctcccaaactaggagtgggctagggtcctggactttgccccaacatccccctcccacgccctgcacgccttcagcccacaccattccacgctttcagcccacgccttctgcggcctccccgtcgggtccagcctcagcctcacccgtcccattcatccacatgacatcgcaaacttgaccctccccctcccttattccaaaattttctctagttccccagtgccccgggaacaagtcgggttcctatgaagccctgtatcccgcagtcccaccttctccccagtgttaagctctactcaggtggggttcctctgcctccccctaccgggctgtaaaccccccgggaaggtaggacctgggctgtttcagtccccatctaggcaggatcagaccctggtgaatgcatgtggagggaagaaagggaaagaaagggaggaagggacagaataagaaggggagggagggtggtgccctttaaaatcaaaacctctggtttcatctttcttccctgaactggctccccacgcccaccagagggcgctctgacccagcaaattcctcatacagcaacagcccgttctacacacaaaagggaattatgaaaataaggattgacaccaataatcgatacttaaagccctactgtgaccagtacctatgctaaattatccacgtgcctaaatcaacacagcaattctgagaatatcttataaatgaggaaagtgaggctcagagaggtcatttaactttcccagtgtcacacagcacataagctgcagagaagcttccagctctggccttggtaaccccacaaccttccgttccttggtcatagcctgacgtgaccaaaccacaatgccctctgtgcctggccctgccacctcctgcccaacccccatcccgaggctcagccacacccttccacccccagctccttagacatcctgttccccatttagtcactggaatcttagcccattggctgcctcgaaagcacttcttccctttccctacccccacctcccacaaatggtcacctcctcccttcagctcaatgtcacctcctctgagtaagcctgtcctgatccagggttagctccatctcttccgactcacctcccctaagaatccaggctttccctgcgctccaggaggcagggcttcagtcatcatcgtgtccccagagccctgcacaggcactacagaaagactgaatgaatgaatggatgagtgaagtctacggggttaaataaatgaacactcaatgagtgacaccctctccctctccctcagccagaaattgagacattctccaacaaacacccacagccaggaagagaagatcccggacccgctagccaagagtgcacgcttcaggctcccaggacccccaaaattcatcctgctgaggctgtcgggggatgctgccaggactctgttggaagccaaggccctagggctcctggagagggtcccatactcccttcagtccctccccaggccaggtacagtgagtctcactaatgccatcatgcctttagggcagagtctcctgctttccagcccagagtccacttccctctcctgaatgattcacctccatttctctccagagaatccccctccccactctccttccaggtgactcctacagggctcacccaatcccctgcccacccaagcctggccagtcagtacgcttcctccctccctggtcactgtgattggggcaggggcaagcacatgatccagttcatccaataggagtcagccctgggtccagggctaaattaatgaatgaaggaaccctagaaccagccatgcctgaagccaaagccacgctggactttttttttttttttttttttttttttttttgagacagagtctcgctccattgcccaggctggagtgctgtggcgcgatctcagctcactgcaagctccgcctcctgggttcacgccattctcctgacgcagcctcccgagtagctgggactacaggcgcctgccaccaggcctggctaattttttgtatttttttttttttttttagtagagacggggtttcaccgtgttggccaggatggtctcaatctcctgacctcgtgatccgcctacttcggcctcccaaagtcctgggattacaggcgtgagccaccgtgcccagccaaccctggtctttatagtaatatgagccaatgaattcctttttcactaacctgcttaaacatggctaacttgggtttctgtacttgggacctaaacagtcctgtgtatcccactcctcaaagcattctctgaggccccaagggaagcagggtggggggtggcttctcagtgtcctgccagtcagtacatctggctccaaatgctggaccaggagttagggggagagggaaagggtcttctggagtttttagaccttggcaccatcatttgccatattcctgagtcttttcaccttgttcctggggctctgggtctcttgtcaacagggaacaagatgacagctgcctggtagagacggtatcaccatccctggagcagatctgtctggaaggcatattctcaatccctgcatttgcaggacagacccaagcttgcacagaggtcagaccagcagcttagtcatggggtgggctgaagatacgaaacagctgatttttctctccattatgttgtccaggtggaagaagggatgaatgaatgaaccctggggctcatcctagggcctggggcttggctcaccatgacagtgttcccagacacggggtgcagcccaggaaagaactgaggccaccctgggggtgctggtgggacagttagcaagacatgaaagggacctcctgggtgtcatgacataataatttgcaggtgtcccaggggttcttcctgaagcccaaagattcccacctccctccaccagcaagtcctcacctgagcaccccgcctacttcccactgcacagcaggctccagcagggtcatggtagcagtggctgcccagaggtcgtggtttttcattttttgttctgttgcccaggctggagtgcagtggcgcgatctcggctcactgcaacctccgcctcccgggttcaaatgattctcctgcctcagtctcccgagtagctgggatcacaggtgcacaccaccatgtctagctaacttttgtattttcttttcttttctttttttaatttttgtgttttcagtagagacagggtttcaccaggttggccacgctggtctcaaactcctgacgtcaagtgatccgcctgcctcggcctcccaaagtgctgggattataggcatgagtcaccgcgctcagccagttgtgattttttactttattttatttatttatttatttatttatttatttatttatttatttatttttgagacagaatttcgcttttgtcatccaagctggagtgcaatggcgcgatctcggctcgttgcaacctccacctcccaggttcaagtgatgctcctgcctcagcctcctgcgtagctgggattacaggctcccaccaccacgcccagctgattttatatttttagtagagatggggtttcatcctgttggtcagactggtctcgaactcctgagcttggatctgcctgccttggcctcccaaagtgctgggattacaggcatgagccaccgtgcccggctggtggtagtttttttacctggatagaatctgtgcccctgcatcaggcccagcccgccgcacaaccttcactcagtctctgtttcacctggcccacactgggtcctaaacatcaaacttaccctagatctggagcctgatgccccagagggaggcccacccagtcccactgactaagcctggctctctgtgtgaggcctgtctcccagagtcacgaaagaccccagtaaacaaacaacatgcatagtctcgttttcagtgggcttcttataacaaaaaatgctctgtccctgcaacagcctgaaaacggttgtcatggaaacagcagtagccaatggaggagggagagacaggcccctcccagagcccaggcctcctgcggtgggtgatggggcacagaagaaccatcaggattaaggggcaacggggaggggggtgtccccatgtggctggagcgggaggagtttcctcatctggtagctctgagagggagccgctgctctcaaagggacccatgagcatccctggagaacagatccatagtctcctgcggatcctcagacagctctggggaggggtcctggggaaaggtcactgtgaacagctggccagcaggcatccaggacgcccgagccctcatccccactccagcattgccacattcactgaaactgggactctaagccctgcgggtggcttgccagggtgtcattgacaccgtgcactgcagtccatccctatctcaggctccctcctgccccaagatcagtgcccagtgggcggcaccatggccatgagccttttgcaggactagtgccaggggcctggacatggacgcgcacagggccctgctggtcaccgggatcctggagggcctggagcaggtggatgttgaagccgtcctgcagtcgaccctcctgcccctgggcacgttcgggctgcaacacatgaagggcttgatggataagaaggcccaggccgccctggtggagtttgtggaggacgtcaatcacgctgccatccccacagaggtcctgggcaaggatgggatctggagggttctgtggaaggaccatgcacaggacacgaggttcctgaggcagatgagacgcctgctgctggatgatgggcccatgcaggccgtggtggctgggacccccggggaggtgcccacccctcccgcttcaaagacccaggctgaggggttgggacagtcatggggaaggccggtgcccctcctggggctacaagcgatagtaacaagaagagtaggggtcacagaaatcgagccggaagctaaaagagggcccgagggacatgtccatttcccttggcaaagaaggaatccaaggaagttccccaggagagcttggacatcaagatcgaggaggcagatgagggggcttgagcagagatgacaatgacagcaggctgtacacagcgctccaggcagcagccagggagcaagttcacaagaagtggaccctctgaagccacaaagacgaggcaggtggtcctatggagttcttggccctgatgaccaggacagacaaagccaaacaggagatgatggaagaaagccctctgatttgatgcacttgaccatcaaagaaggcaggagcagtgactcccatatggtggctcttctggccaccagagacatacctgaatgagatgctgaagggctgtaaagcttcagaaagtgggcgggtgcaaccaccaggtcacagagcggggctggaggaccctgagttcctgactactgcggcctgtaccagcccttcagacaccaaaagctgccaggaggtgttgaaaatcgcttctgaggcggggtgcggtggctcatgcctgtaatctcagcactttgggaggccgaggaaggcagatcacctgaggtcaggagtttgagaccagcctggccaacatggtgaaaccctgtttctactaaaaatacaaaaattagctgggcgtggtcgtgggctcctgtaatcacagctactcaggaggccgaggcaggagaatcactgcagcctgggaggcagagtttgcagtgaaccgagatcgcgccactgtactccagcctgtgcaacagagcaagactccatcaaaaaaaaaaaaaaaaaaaagaaggaaggaaggaaggaaagaaagaaaggaaagaaagaaagaaagaaagaaagaaagaaagaaagaaagaaagaaagaaaaaattgcttctgtgatcgactctttgggctggaggaatgagaaagaaaaaacgatgccctctcgcaggtcttgtctgtcctgtccaaggacactgtggtcccgcggaaagcctgagatgacaggaaccttctggagtgcattttcaccttggcgcagccagaaccccctccctggaggaagaaggctgagcctggcctcctcagggtctggggcgaggattaaaagagacaaaaaggacaaaaagagcgaagtggctcctggagctggtggtgcgcatctggcggctcaggcattgctgcagccgggagcaccacctggggaagagggaaagaggaaaagggtggggaggtgggaaattcaaatacaccaaaggcaaccaagggactacgcagctttccaggctgccagtgaggacataaagtcgggaaaggcagctgcaggggcagcagtagcagagttcgaggacacagagagcaaggcatgggagcctgagggcaaggcgtccaggaagcccctggccaagagggcgcacacggccccccggggcctggtcttcaactgcagacacaagtgattctcccgcctcagcctcccaaagtgctgagatgatagacgcaagccaccgtgaccagtctggtgtccacttcttacttgtcccattccttggtctgaacacttaggttccacccatggtttcgtgtttggctcatctgggcctgctcagcatatgtgaacttcaacctgggggtccatggcaactgaaaaagcaactcaccattttattccacaaagttgaaccggattaggctggttctgaggttacatgaacaacaagttacctgctgtgactgtagtcccaactcactccctaccttggagggctgtcactgtgtttatctcagtaacaaagacccctgaagtcccagtgccttgcaacgattaaggtttcttttcttttttttcttttctttcttttcttttctttcttttttctttttgagatggagtctcactctgtcacccaggctggaatgcagtggcgccatcttggatcactgcaacctctgcctcccggattcaagcgatcctcctgcctcagcctcccaagtagctgggattacaggcccacgccaccacgcccagctaattttttttttttttaagtagagatgaggtttcaccacgttggccaagctggtctcaaattcccgacatcaagtgatctgcccgcctcagcctcccaaagtgttgggattacaggtgtgagccaccatgccaagcctaaaggtttattttcacatacatgttggtagtagtggctgtgggtcaggcagaagggagaccccctgtttggatcttttctgcaggggctcacagcatggccactcatacaacacagaccaatgcaagtcgcaagttgcctctttggggtaagaatgcatcccctcccgcaggggtaccccaagccacatggcgacagtcagggacctatatcctcctacagggaggcagcgaatggaacaacaaaataatctaacacatcgcccgcccccccatcagaggcaacacctcttcccatgtggctgatgagatcttgtctcctccaccagactgtgaccaccgtggggacagattttgttcattgttgtgtccccagtgcttggcatattgtaagaactcaatgaatatgtgttgaatccatgaataaataaacaagtaagtcttgcttttctgtctcatatctgactctccccaacccctctccccaactcaggcttcctagactcaaatcctgaatccactgcttaccacctgtgtgaccttggatagatacttaacttctctgggtctcaatttgtttatttgcaaagtgggaaggatactattttgtgctttatagggttgttattgtaacttatcacacacacacacacacacacacacacacacacacacacacaccctgtgcctggtatgtagagagtcttctataccaattagctgttgtgtttgtttgtttgtttgcagaggagggacagggtatcactctgtcgctcaggctggagtatggcagtgcaatctcagctcactgaaacctctgcctcccaggctaatgtgatcctcccacctcagcctcccaagcagctgagactacaggctcatgccaccacgcctggctaactttttgtctagacataggtctcactacgttacccaggctggtcccccaaactcctggactcaagcaatctgcctgcctcagcctcccaaagtgcgggattacaggcgtgagccacgcagttattgctgctgttgtcactgtggggaagtggccaagggcacaggtttggagccagagggtcctggtctgagtctcactctgccacgtgttatgtttggcctcaactccctgagccttaacgtcctcacctgtaaaactcaacctcaggacattcttgtgaatttcaggcgtgattttttacgcaaagcatttagcatgcccctggtgcgatgtaaacacaagccatagctatgaggatgtaggaacactgtgggaatcctgcgtgtgttgatgactgcgtgtggagcgcccctgctggacaatcacagaacagcacgactgccctgaccggagacctctctaccccagcatcctcaactgtaaaattataataacagtaatgccaatatgagattgaggattcgttgagttaatacatgtaaagtttctcgagtagcatgatgggttaaagatgagtacaaattccttatccttctccccatccagaggtggagtttatagaatgagatggaagtaacattgttactgatgtgggatgtagacttcaagaagactggcagcttctgcttactgactcttagaacacttgctgttgggacactgtccctgagaacccagccaccatgctgcggaagctcaagccacatgcagaggctatgggtagttgctacagttgacagccccagttgaaatcccagccaatagtcaacatcaactggcaggcatgtgagtgccccatcttgggtgttccagctcatcttgggtgttccagcccccatgtgactgcagcccaaccaacattgcaggaagcagggaaaccgtcctgttgagccctgttaacccacagaatcgtaagagacaataaaataattattgggttttttttttttttagataaggtctcactctgtcaccaaggctggagtgcagtggtgcgaccatggctcactgcagcctcgaccgcctggactcaagcgatcctcccacatcaatctcccaggtagctaggactacaggtgtgcatcaccacacctggataatttttctgtacttttttgtagagacagggtttcaccatgttgcccaagctggtcttgaactcctgggctcaagtgatccacctgcctcagcctcccaaattactaagattacaggcgtgagccactgcacctggtcaataattattgtttaaaccacaacattctggggtagtttgttatgcagcaataaagagctgaaacaaataatatctagaacatagtaacaataagctgctattattatgtcattcaatcttcacaacaactctgtaagattgacatcaatagtacctgtattagtctgttttcacactggtgataaagatatacccaagactgggcaatttacaaaagaaagagttttaatggactcacagttccacgtggctggagaggccttacaatgatggtagaaggtaaaagtcacgtctcacatgatggcagacaagagagtgagagccagggaaaaggggttttcccttataaaaccattagatctcgtgagacttattcactaccatgagaacagcatgggggaaaccgcccccatgattccactatctcccactgggtccctgccacaacatgagggaattatgggagctacaattcgagctgagatttgggtggggacaccaccagatcatatcagtacccagttctacagctgtggaaactaagactgcacccttaaccacactgtagcatttgatggaagttgaaggacctaaaatgggtttcttgtgtcaaaagatttagctgagggaatcaaatatatatagatctgtgatttgggcaggaaacagaaacccagaagccttttgggaagcacttcccaggagtataagatacatgcacagccgggtgtggtggctcacgcctgtaatcccagcactttgggaggctgaggtgggtggatcatgaggtcaggagatcgagaccatcctggcgaacaccgtgaaaccccgtctctactaaaaaaaaaaaaattatccgggcatggtggcgggcacctgtagtcccagctacttgggaggctgaagcaggagaatggcgtgaacccggggggcagagctttcagtgaggcgagatcgccactgtactccagcctgggcgacagcgagactccgtctcaaaaaaaaaaaaaaaaaaagatacatgcacttcccatctgtggaaaagttaacagaaaattgtgtgtatgcatggggataagttactcatctactggtggaaattttctttatttattattttatttacttattattattatttgagaaagctggagtgcagtggcttgatcttggctcactgcaacctctgcctcccagattcaagcaattctcctgtctcagccttctgagtagctgggattacaggtgcacgccactacacccggataatttttgtattttttagtagagacagggttttgtcatgttggccaggctggtctcaaactcctgacctcaggtgatccgcctgccttggcctcccaaagtgataggattacaggcatgacccacagcgcctggccagaaaattttttaaaacaagtttcagatacttagattctggcttcgttaaaactatggtttaaggctgggcacagtcggtcacctctataaccccagcactactttgggtggccaaggcgggtggatcacttgaggccaggagtttgagaacagcctgggaaacatggtgaaaccccatctctacaaataaaagaaaaaaaaattaacacacaggtactcttagctacttgagaggctgaggtgggaggatcacctgagcccaggaggttgaggctgcagtgagccgtgatcacgccactgcactccagcctgggcaacagagtaagaccctgtctcaaaaaacaaaacaaagcaaaacaacaaaaactatagttgaagctgttggcagctagttccaaagatattggtgggtgtattagtttgctagggcacatatactgggtggtttaaacaacagaaatctatttactcacaattttggaagctagaatctgagatcacagtgttggcaggattagtttcttctgcagcctctctccttggcttgcagatggccgccttctccctgtgtcttcacgtggtcttccctctgtaccatctgtgtctaaatttcctcttctctctctttttttttttttttttttgagacagagtctcactctgtcgcccaggctggagtgcagtggtgcaatctcggctcactgcagcctccacctcctgggttcaagcgattctcctgcctcatcctcccaagtagctgggactacagtcgcccaccaccacgcctggctaatttttgtatttttagtagagacggggttttgccatggtggccagcctggtctcgaactcctgggctcaggtgatccacctgcctcagcctcccaaagtgctgggattacaggcgtgagccactgcgcccggcctaaatttcctcttcttatgaggacatctgccatgttgggttggtgcccactctaaagacctcattttaacttaattgcctctctaaacgccctttctccaagtatagttatattctgaagtactggaggttaggacttcaacacaggaatttggagggaacacaattaaatttgtcacaatgggaaactcgggactggagggactgtgggcacaggtgtttcccaggcaggcaagggaaggttctaattaggttacaagatggtaaggtccatatgagcagaaacctatgttcgaattgttcacttctatgttcctgaattatactggcactgaggagatgctcagtaaatgtaaactgaatgaatgaaaaaatgaggccgggcgcggtggctcacgcctgtaatcccagcactttgggaggctgaggcgggcggatcatctgaggtcaggagtttgagaccagcctggccaacatggtgaaaccccgtctccactaaaaatatgaaatttagccggacgtggtggcaggagcctgtaatcccagctactcgggaggctgaggcaggagaatcgcttgactccgggaggcagaggttgcagggagctgagatctcaccattgcactccagcctgggtgacaagagtgagactcagtctccaaaaaacaaacaaacaaaaaaaaacaaataaaaacaaagaatggacattggatctatatatatcatgtttatttcctgggtgaattgtaagcaaaaagcttgcctataagacagaatgttaagcccagtggtcttgtgtggattctttctggaatgtaactcttcatcttgagactgtggttcctataaagtttgtttcaagtgtttattatatttaattattgcatttttttgagacagggtctcactccattgcccaggctggagtgcagtggtgcaaacatagctcactgcagccttggcctcctgggcttaagtggtcctcccatctcagattcccagtgttgggattacaggcatgagccaccacgcttagcaaagtcagtgctttcaaacataaaaaaaaaaaagcccgttctctcttgcagctgtataggaaggggttctattctgcatcatgaaattgctctaaataattagttttttcactttaggaggccgaggagggcggatcacttgaagtcaggagtttgagaccagcctggccaacatggtgaaactccatccctactaaaaatacaaaaaaattagccgggcgtggtggcaggcacctatcatccctgctactcgggaggctgaggcaggaaaatcgcttgaacctgggaggcgaagtttgcattgaaccgagatcacgccactgcactccagcctgggtgacagagcaagactctgtctacaaaaaaaaaaaaaaaaaaaaaaaaaatcaattttaatagagtggcacattgagaacataccctaaacattcattctgttctcccgtgcagccaggagctccagttaattttcctgttaccagcctcatttgttaactctgttcatttgtgtctttccttgaaaggataatttgaacaaaagagtctaagatttttttagaaattgttgcaatatctgaaaaaaaaaaaaaagaacctcccaaagaaacctgcattctgattggttgtcttccttgattatttgttgctatggtgaccaggaggttaaatagcatctctgtatttcctaaagaataaatactggttggttttctctggcaaatcagaaaaggatcatttctctccttccatgatcatgatgcaataaaagcctagggctcttctagatttatattttatcaaagaaagtgagagtcttgtcttatccaaattaacagaagcacttagtccagtgtccagtcgcttgagtggcggtggccactctcggaagggcaattacaaactgtactaatagtaagtccagcgcgccatctggtggccaattagagaatagcatgaccgtatctacttaaactaaaaggcgactcacctcccttcttgtctgttaaggctgccctagcaaattaatacaataagcttgttcctgttggtcttagtctgattgagaaagaacccttgactgctttgacccatagaatatgacagatgtgacactgtgctgggcatggcggctcacgcctgtaattccaacaccgagaagcagaggtgggcggatcgcttgatcccaagactgcaagaccaacctgggcaacacagaaagaccccaactctactaaaaataacttttttgttttgttgtgagacggagtttcgctcttgtcgcccaggctggagtgcaatggcgtgatctcggctcaccacagactccgcctcctgggttcaagcgattctcctgcctcagcctcccgagtagctggaatgacaggggtccgccaccgcacgtggctaattttgtatttttagtagagacagggtatatccatgttggtcaggctggtcttgaactcccgacttccacccacctccgcctcccaaactgttgggattacaggcgtgagccaccactcccggccaaaaatataacttttaaaaataggctggcgtggtggcccgcacctgtagtcccagctactcgggaggctgaggcaagaggatcccttgagcctaggaggtagaggctgcggtgagctatgatggcgccgctgcactccagcctgggtgacagaacgagaccctgtctaaacaaacaaacaaacaaacaaacaagtgacaccgccaggcctggatctacattttaagggaaccagcagattccgtcgtgatctctttggctcccaggctactgtgtaagaattgcaactccccagccgggcgcggtggctcacgcctgtaatcccagcactttgggaggccaaggcggcggatcacgaggtcaggagatcgtgaccatcctggctaacacggtgaaaccccgtctctactaaaaatacaaaaattagccgggcgtggtggcaggcgcctgcagtcccagctactcgggagactgaggcaagagaatggtgtgaacccaggaggtggagctttcagtgagcccagatcgcggccactgcactccagcctaggcgacagagcgaaactccgtctcaaataaataaataaataaataataaaaaaagaattgcagctcccctaagagcatggagctgtgagaaggcccaggagaattgaagcttccagacatgggagtgaagaagccatcttggaggtgggtcctccagccctcatcacatgatgccacgtggaacagaaatgaacatccagtcaaacccttttcacattcctgacccacaaaatcctgaacaagcttgggaattaagctattactgtgccattttttgttgttgttgtttttgttttttctttttgttttgttttgggtttttttttttttttttttttttggttttctgggttttatttgagatagagttctgctcttgttgcccaggctggagtgcaatggcactatctcggctcactgcaacctccgcctcctgggttcaagtgattctcctgcctcagcctcctgaatagctgagattacaggtgcccaccaccacgcccggctaatttttgtatttttagtagagacagtgtttcgccacgttggccaggctggtctcaaactcctgacctcaagtgatccgcccacctcggcctcccaaaatgctgggattacaggcgtgagccaccgcctgcggccattgtgccacttttatagaggaggagattgaggttcagaggcccagttgatggtccaagatcacacactgggaagtactggaaccagggttatgaaatcctgtctgcttggctgcaaagcctctactcttccacactgcattatttaggaagacagacaggctttgggcacgagcgtgggcctcactgaggggagaggggccttctggcctcagtaatatccctgttcccttctctgactgtcacttcccccttagagacagagtttctgcagagtggagtctcttctcacgcctgggagagtttgtgcaggagacatgagagctgaagatctggcaccacctttgccttaaagacaaaaggtgacatttgggaaaagcatgccactcttcgagtggtacttaaggatccatgggctgaatctgcctttttttccccaactgatttggcaaggaccttcaaataaatccagtggagcttcttggggcagcatggcccactctcaagagtttagcctttgagtcatgtgtggtggctcgtgcctataatcccagcactttgggaggccgaggcaggctcacttgaggtcaggagttcaagaccaacctagccaacatggtgaaaccccatctctgctaaaaatacaaaaatcagctgggcatggtggcaggcacctgtaatcccagctactcaggaggctgagggaggagaatcgcttgaacccaggaggcagaggtggcagtgaactgagatcgcactactgtactccagcctgggcaacagagcaagactctgtctcaaaaaaaaaaaaaaaaaaaagagagagagagagagaatttagcctttggactcgcacagatctaggttcaaactccagctttgctactgcagcctcagcgcacttatctgtagaatgggatttcaaaatgatgtctgcttctcaaagttgctttgagaatttgctgatattttgtctttaaaatacttcattgtgtgctgccttacacaaagatcagaatctctgaaaggacaggacaggaactttttactcactcactgcttcactcactgctgtatgcccagtgctttcaaaagcacctggggctgggcgcggtggctcatgcctataatcccagcagtttgggaggcagaagagagcagataacctgagatcaggagttcaagaccagcctggccaacatggcaaaaccccgtctctactaaaaatccaaaaaaaaaaaaaattagccaggcatggtggcgcatgcctgtaatcccagctactcaggaggctaaggcatgagaattgcttgaacccgggaagcggaggttgcaatgatccgaaatcaagccactgcactccagcctaggctccatctcataaaaaaaaaataattaaaaacagtaaaaataaataaaaagcactcagcgtgggattttcaataaatagttactgaatgagtaaatcaaaagcagtcaatgttacatatgatgatcagggcattttcagttgcaagcaacagaaatctaagtcaaactggctaaaggagaaacaaaaattcactggccatcttattgtaagacaatagtgtagcttaaacaataaaaacaaattgaattctctttcccatagtagctccggggtgaatgaccttgtgaggctgtgcgtgtggccatcattcaggaacccagattctttcggattgttgcttaaagtgtagtcccgagaccagcagcagcctctggcaattcataggaaatgcacattcccaggttcccccaagacctactaagtcggaagctccgggggcaggacccagaaaactgtgccctaacaaactctccagggaattctgatgcccactttgagagccactgacctcatgctctgtcagcatttgcataattgaatgtgccacctctgagtgacttggtgaaagggaaaaaagagaaagttcagagcaagacatttccttgaaagcaggtaaagtggaaattgcgcaagtcatgtccaactgcaagccactggggaggacccagtcatgtggctgcagccaacctcaagggaggctgggaaatgtagtccccagccaggcagccatgtgcctgaggagaagaggagatgggcttttgctgtccaaaggtttttgtttgtttgtgttaagagacaggacctcactcagttccccaggctggagtgcagtagctgcagcctcaatctcccaggctcaagggagcctcctgtctcagcctctcaagtagctgggactacaggtgcatgccaccatacccagctaatttttgcatttttttagagactaggtctcaacatattgcccaggctggtctcaaactcctgggctccattcacctgggccttccaaagtgcttggatgacaggcatgagccaccactctaagcccctgtccaaagcttaagactgctgcagccatactcctcagggtcccaaagtcttccttgttacctgaaagcagaaataaatagttctgaggtgccagcagttttcatggacacctccccaggtgatatgattaggcttcatgtccccacccaaatctcatcttgaattgtaatcgccataatccccatgagtcaagggagagacagatggagataattgaatcatgggggtggtttcccctatgctattctcatgatagtgagtgagatctaatggttttgtaaggggctctttcccctttactgggcacttctccttcctgccgctttgtgaagaaggtgccttgcttcccctttgccttcagccatgattgtaagtttcctgaggcctccctagccatgtggaactgtgagtcaattacacctctttcctttataaattacccagtctcaggcagttcttcacagcagtgtgaaaacggactaataggccaggcgcagtggctcacgcctgtaatcccagcaggggaggctgaggtgggtggatcatgaggtcagaagttcgagatcagcctggtcaatatggtgaaaccctgtctctactaaaaatacaaaaattagctgggcctggtggcacacacctgtaatcccagttacttgggaggctgaggcaggagaatcacttgaacccaggaggcggaggttgcagtgagctgacatcatgccattgcactccagcctgggcaacagagagagactccatctcaaaaaaaaaaaaaaaaaagaaaggaaaagaaaagaaaatggtctaatacaccagggcacggccaaaagggtccttaaaggttttgctccccagcatcagtttaaccacctggaaacaagaggccagaaattgctgcaggcagggaacagaggtcttatgctatggactgaattgtgtccccttatccccaaaattcatatgttgaagccccaacccccaatacgactgtatctggagataagagtctttaggaggtaattaggttaaataaagtcacaaggtaggatcctaatctgataggactatgaccttataagaagagaaagggccaggtgcagtggttcatgcctgtaaccccagcactttggcaggctgaggctggaggatcacttgagcccaggagttcgagaccagcctgggcaacagagtgagaccccacttctaaaaaaataaaaaatattttttttaaaaagagaagagaaagctgtctccctgaccatgtgaggacatagtgagaaggtggctgtctgcaaaccaagaagacagccctcctcagaacctgaacatgctggcaccctgatctcacatttgcagcctccagaactgtgagaaaacagaattctgttgtttaagccacccagtctgtggtattgtcttacggcactctgagctgacttaagacagtccagaggggagacattgttaggagaagaggcctctaagaaggtgaagagcgtgcctgagacccttcccagtgtagctccggcagtcctcagcctcagtcttccctgggtccttgtggatgacaaagaagcccccatcacaaagaagcaccattgattgggtctgcaaaagacccagtgggactcacaggagctcacatcagggtcactggagtcaagggcctccataccacaggctcaccacatctgggatctcaccactcgcactaaatatgggaataggaaacctcacccagtgtgggtcccaaggagcaggcttctagtctgggaaatcatgtctcttttgatggcactcgcagttcctccttccctggctctagtctacacttattactgtgctctacaaagccctgtgtgtctaactcctgcatagtaatccaagtagcagaaacactttctttttattaaaattcattctcccattcctccctttagtaataagatgattgtggctgcccaattagaaacaacatctgggctggtcatggtggctcatgcctgtaatcccagcactttgggtggccaaggtgggaggattgcttgagcccaggagttcgagaccagccttggcagtgtagcaagaccccatctctaagaaagaaagaaagagagagagagacagagaaagaaaaaaagaaacaaaacacctgccagccttcctgataactaagtaagctcatgcacctaagttcaagcccttatgagctcaagtgatgtgtacagcttctggtcagttcctataaataaagatgctggcccttgactgtcttcctttctccttcctggctggggaacaactacagcaggaacataactaaagagagaagccatttcttaaagatatcaaagccaattcacaagcctgaacaccctcatgaagcaaaagtgtctgcctgccccagaccagccacctacctttggatagagggagagagagagagagaaaaaagttcatcttagttaagccacagtctttcattagctattttcactgtcttaaactctcttttatatttttcttcttttattttctctgtgcctcagtctagatattttctagtggcctgacttccagctcattcatcctgccttctgctgtgtctaatctgttgttaaagcacattgactgaattccttgttattattatttgtataaatttaaggggtgcaagtgcagttttgttacatggatatattgcatagtggtgacatctgggtttttggtgtaatcattacctgaatggtgtacttcgtatccattaagtcatttctcatccctcgccccctaccaccctcccactcttcccagtctattatttcacactctatctgtgtatacacattatttagcttccacttataagtgagaacacggggtatttgactttctgtttctgagttgttccacttaagaaaatggcctctagttccatccatgctgctgcaaaatacatgatttcattcctttttatggctgagtggtattccattgtgtgtgtgcacacatacacaccacacacacacacacacacgcatatataattttctttatccagtcatccattgctggacacttaggttgatttcatatctttgctattgtggatagtgctgctgtaaacatacaagtgcaggtatcttttttcttttttttgagatggagtcttgctctgttgcccaggctggagtgcagtagtgcaatctctgctcactgcaacctctgcctcctgtgttcaagtaattcttgtgtgtcagcctcctgagtagctgggattacaggcacatgcaaccatgcccagctaatctttttgtatttttagtagagacaggatttctccatgttggccaggctggtcttgaacccctgacctcaggtgatcaagtgttggggcctcccaaagtgttgggattataggcatgaggccaccatgcccagctatctttgcctctttgatgtaatgatttattttcctttgggtatataccccatagtggaattgcagggtcgaatggtagttctatttttagttttttgagaaatctccatactgttttctgttttctatagagattgtactaatttacactcccaccaacagtatataagtgttccacttactgaattcttaatttcagttatggtacttttctactctagaattgccctttctctggtaaaattacccatcctttcatataatccctgcatgtttttttcttttgtcttgagcatattaattctagctatgtaagatccttgtctggtaactccaatattaagattatccatgggtctatgtatactatctgttttttctcttgcttttcagtcatttggtctcgcctctagcatgtctagctattgaatgtcaggcattgtacatgaaaaattgtacatactgccccagagaggaaattatctttatgcagatagagtggtgctcatcactttaattcagtcaaaaactgggctgaatctagactgggttgccattttggaaaggcaccatgcatatctagtttgcacttgctcatggattttcaacctggagcctgggttataacctgggggtccatgatcctggcagctcttgaactcttcttgtctcttcagcattgcaagtctgctgaaactctattctgcttttcagaggctttcttcctggcttcttagactctaccccatgtagcttcagagttctgcaatgtcctcaaacaggaaccagaaaatcattaggctctttttaacttctcctttccccaggtcctagtccttcaagtctaattttgtccttcctgctctttgggtgtctgagaaggattcttctgcccaactcttttgcccagatcttcagtctccttccccatacccagaagcatcaaatgccctggagacagaaactgcaaaatgttggctcagctcagctctctatactgttcccccatatttgagattttgttctcttgactcctagttgccttagcagctcaccaatgctttgaaataatcattgctgctttttacatttttaattggcatttcaaattactcctagcagcactattggtctttcataaacaatttcatcatatccagaatcatgggtcattgtattttgaggttttttggtattcatagcttagcctgtaccctgactaacacataacttggcacctggtagtggcactgcagtaacaaaaccctaaaatatgtgacattggcttaacaatcaggcaacaagtaatttaaaatacagatttttggctggtcatggtggctcacacctgtaatcccagcactttgggaggctgaggtgggcagatcacctgaggtcaggagttcaagaccagcctgggcaacatggtgaaactccatctctacaaaaatacaaaaattagccaggcatgatgacaggtgcctgtaatcccagctactcagttgactgaggtgggagaattgcttgaacccggcaggcagaggttgcagtgagcccagatcgcaccattgcactgcagcctgggcgacagagtgagactccatctcaaaaaaaaaaaaaaaaaaccaccaaacaaacaaaaaaacaaacaaacgaacaaacaaacagattttgcaaaccttgtggccaatgacccctatggggctgtgtaaaatcatttggtagaaaaatcatctgcaataacatggaagagagtccacatacttatgaaatctatggtttagggagctgttaaaaaataggattttttattgtagtaaaatatatataacataaaagttgctattttaaccacttttaagtgtgcaattaagtggtattaattgcattcacaatgttgtgaaaccatcaccactatctatttctagaacttttaatcaccccaaacagaactctgtaatcgttacttagggaataatttgttgttataatttttaaattgagatatcattcatctactacaaaattcacctcttttaaagtatacaatttagtgtattttatatattcacaaagttgtgcaaccatcaccacaatctaatgcttgacctttttcattgccctaaaaagaaaccccatacccgttagtaatcactctccattctcttctacccccaggccttggcaacctctaacctactttctgtctatgtagatttgcctattctggatattttataaagatagaatcatacattatgtggccttttgtgtctggcttctttcactgagcataatgttttatgggttcatccatgttgtatcatgcattcaaatttcattcttttattatggccggataacattccattgtatggatatcctaaaatttatttatctattcatcagttgggagacatttaggttatttctattttgggaatcttataaataatactgccctaaacattcatgtatgagtttttgtgtgaacatatgttcttgggtatatatctaggagtggaattgctgggccatatggtaactctatgtttaacttttgaagagctgccaagttggtttccaaagttgctatgccattttacattccccaccagcaatgcaagagaattataattttttccacatcttttccaagacttgttgttgtctgtcatttttattaaagccgtcatagtgggtataaagtatctcattgtgattttgatttgcattttcctaatgactaatgatgttgccttcttttcatgcacttcttgatcatttgtatatcttcttcgaagtaatgtctattcaaattattttcccattttaaattgggattgtttatattttgttgttgttgagttgcaagagttatataatatatatacatatttcttggatgctagactcttactatatatataatttacaaatattttatcctattcagtttgttgtctttttactttcttgatggtacccttcaaagtgtgaaagttttacaatttgatgatgtcccatttatctatttttttctgtagtagtttatgcctttcatgacatatttaagaaaccattgcctagtttaagatcatcaagacctactctatgttttcttctaagattgtatatttttagctgttacaattaggtctttgatttgttttgagttaatttttgtatatggtgtgaggtagggttccagctttattcttttgcttgttgatatccaattatcccagcaccattagttaaaaagactactccttcccccattaaatgatcttggcactcttgttgaaaatcaattgaccatgaatgtgagagttcatttctggaatctcaattctattccattgatctatatgtctgtgggtgaatggtttttaaaaggcaggatattgatgtattctggctacttcctgctgcttttaaaaaatcgtaagtcagaaatgctcccaggcaagaattgaccagttcacaaacaaaaatggacagaagtaaaattcagcaaaggaaagaggcattttctttctttagcctaacatctaaatgtattgtgagtctagaggcttggagtcttacagattgacaaggttactaaacaacaagagagagcctccaagcctttttgagaattgacattaagattttgtggccggaaaaggagaatcagaccagaagcaaaaatctgatttcatatattattgttccattcaagattgttgtttccaatggtctcaaatagctgctataaatatggagtgatcacaggaactatcaatggcttacagacaccttatggaagctcactgcaccatctgtaaagttgtcttgccaaagagtgagatttaaatttgattgagcttctagttctaaatactagtttacaggataaacagggaacagaggaatacattaagaaaccccacatggatgcagtcagcagaattcagaatgtggaaaagctataggagaaaatgacctggtttctccaaaaaataactgcaagaaattaaataatgatccatgctacaatatggatgaacctttaaaacattatgctaagtgaaagaagccagacacagaagcccacatattgtatgatttcatttatatgaaataaccataataggcaaatctgtagaaaaagaagaaactgagtggttgctggggctgccaactggcatgggctttcttttttgggatgatgaaatgttctagaattagataatggcaatagttggacaactctgtgaatatactaaaagccatcaaattgtaacctttaaatggatggattatatgatacatggattttctctaaataaagctatttaaaaatcacaaagaaaaaaagaaggggaggtgtattagttgaatgaaatatatgggctttgttttgatcctgattgaaaatgttttaaaattatgagacaattggacaaatttgaacactgactaaatacttggcgatattaagaaagtacaggccaggtgcagtggctcatgcctgtaatcccaacactttgggaggccaaggtgggaagattgcttgaacccaagaattcgtgaccagcctaagcaacatagcaagaccccatgtccacaaaaaaaaaaaaaaagaagaagaataaattagccaggcatggcagcatacgcctgtaattccagctacttgggaggctgaagtgggagaatcacttgaatcgaggaggtggaggctgcagcgagccgtgatcatgccacagcaccccagcctggggaatggagcaagaccctgtctcaaaaaaaattaagagaaaatatttttagtattgggggggtattgtaatgatattgtaattatgtttttagtagtagttatctcttggagatacatactgaagtgtttacaggttaaatactatgtctgaaatttgttttaaaataatccaatcataagggaaagcaggagtatatagatgaaatgagactgacatatattgacaatcattgaacataagaaggttcattatacattctccctgcttttggacagtttgaaatttcccataacaaaaagaaaaaataaaaatctaaatgcttaagaattatatctggaagagatctttaggggtgggactcataaatggaattgattggaagcaaatagaccaaaaacttaccaagcatttgaggaaattttcttactaaggaaaccataagcctgatctataaaagactaattgctcaatgtctcagagaggtgagttgacttctgaagagtccctgaagacatacagagaggaaatggtgcagaagcaatatcgaaagacataacatctgcaaatgtttcagaactgatgaaagacaccaatccacaaattcaagaagtctttcaaactcaaaataaaataaacacaaaggaaatcaaacacagacacattatagtaaaactcctaaaagacaaaggcaaagagaaaagtcttaaaagcagtcatataaaaaaaagggtagattaccttcaaaagaggaacattattaaagctgacagctgacttctcaatcagaagacaacgaatcatatttttaaagtgctgagaaaaagtaaatgccaacatagaacatatactcagtgaaaataggattatgacatactgtagtgccagcttaaacatactatataagattctttttaactttatggactcaaactaatactgagctatttaatgaataatctttgaacacctggataatgtataagtatgggttaatatataagattttaaaaagaaaatgagaaagaaaaacagactgtatcatgccatctggatgatgggcaaaaacagtaaaactagaatttgatgttttttctgtctttaaaatgacaaagggatcttaaagtattcagtctgctctcagcaaggcatagtaaaaaagttattctttactttctgtgaaatttgtccgggtagcagaggttcttgccttactaaatattcttgtttgagaagatttaacttttttttcctttttgctgaccttagtcatattgttgaattgtttattttttaaaacgtgcagtaaaagattgtcacttacaaaaagctaaattcccttatagttaccttctactttatttatttatttatttatttatttatttatttatttatttatttttgagacagagtttcactctgtcacccaggctggagtccagtggcatgatcttggctcactgcaacctccgcctctcaggttcaagtgactcttctgcctcagtgtccctagtagctgggactacaggcacgcaccaccacgcctggctaattttttgtatttttagtagagacagggttttgccttgttggccaggctggtctcaaactcctgacctcacgtgatccacccacttcagcttaccaaagtgctgggattacaggcatgagccaccgttcctggcctatatttactatttttttttttttttttttgagacaaggtctcactctgtcacccaagctgcagtgcagaggtgcaatcacggctctctgcagccttgaactcccagagccaagtgataatcccacctcagctgggatcacaggcatgcaccaccaatgcccaggtaattaaaaaaaaaaaaaaactgtagagacagagtctccctatgttgcccaggctgaactcaaatgatcctcctgcctcagcctcccaaagagttgggattacgggcatgagccactgtgcctggcctatttttgaatatcttgattgtcattatggttaatagggtagccaagctataattactcctttctcttaggcaattatgcacctattttagtcaagtgatcagtattttggacaattctttttgatgtttcctttcataaaatcagactataaattcagaaaagttaaaaatcatcaagatgtttgtacattcaaaataatctttggcccttcctggatggccaaagcaccaaagatctgttccctcaccttgtaacccaccataggaaatacacacacagggcaggatgctagaactcttaagtatatttgatatgctttttttttttttcaagacagagtctcactctgttgcccaagctggagtactgtggtgtgatcttggctcactgcaatctctgcctcccgggttcaagcgattctcctgcctcagctggagaatgttgcccaggctggtctcgaactcctgggctcaagcaatccacctgcctcggcctctcaaagtgctgggattacaggcgtgaggcaccacgcccagcctatatttgatgtgcttctgtttttaaaatgattctacaatagtgtaaaaacctccctgatttttgaacacacaatgtgaaaaatgctttcaaactaaaaagatgagttcagccttccttagattaattttgtgcattaaatgtcactattataaatatatctcagagactgtccacttttacaggatggtgatgtgtcaatatcttcagtgtccataatctgttcttgcccccaggagaaacattgatctaattctcttggaataattatatagtatgccctaatagagcattctgttttcttcttattagatagtattagtcactgtagtaaattccccatcattatttagtcctacaatcaataagtgacttctgctttcctttcatgctttcctgaaggttagctggaaactacaggccagaaattgggtcttggacaaaggaaagtcaaagtgcctcgatgaatagacaatacctgataccctgagctactgacacttcaagaaataggctcactgggttcaggttttcccatgtgtatgagtctgttttcatgctgctgataaagacatacctgagacatggtgatttataaagaaaaagaggtttagtggacttacagttccacgtggggctggggaggccttccaattatggtggaaggcgaaaggcacatcttacatggcagcaggcaagagagagaacttgtgcaaggaaactcccccttataaaactatcagattggctctctgctcctcccgttcaacagacagccgcatcttcttgtgctttgccagccacgtacgtccctgagacaccacagtgaagttgaagtccggagtcaatggatttgttggaaccgggagcctagtcaccagggctgtttttaactctagtaaagtagatattgttgccatcaatgaccccttcattgacctcaactacatggtctacatgttccagtatgattccacccatggcaaattccatggcaccatcaaggctgagaacgggaagcttgtcatcaatggaaatcccatcaccattttcgaggtgcgagacccctccaaaatcaaatggggcaatgctggtgctgagtccatcatggagtcgaccggcatcttcaccaccaggaagaaggctggggctcgcttgcagggaggagccaaaagggttatcatctctgccccctcttctgacgctcccatgttcgtgatgggcatgaaccacgagaagtatgacaacagcttcaagatcatcagcaatgcctcctgcaccaccaactgcttagtgccccagccaaggtcacccatgacaactttggtatcgtggaaggactcatgaccacagtccacgccattactgccacccagaagactgtggatggcccctccgggaaactgtagcatcatggccgtcggactctccagaatatcatccgtgcctctactggcactgccaaggctgtaggcaaggtcatccttgagctgaatgggaagctcataggcatggccttccatatccccactgccaacgtgttggtcatggacctgacctgccatctgggaaaaccctgccaaatatgatgatgtcaagaaaatgatgaagcaggcattggaggaccccctcaagggcatcctgggccacagtgagcaccaggtcgtctcctctgacttcgacagcgacacccactcttccaccttcaatgctggggctggcattgccctcaacaaccactttgtgaagctcatttcctggtatgacgatgaatttggctacagcaacagtatggtggacctcatggcccacatggcctccaaggagtaagacccccagaccaccagctccagagagagcatgagaggaacagagaggtcctcactgctggggagtccctgccacactcagtcccccaccacactgcgaatctcccctcctcacagtttccatgccgatcccccgaagagggaggggcctagggagccccaccttgtcatgtaccatcaataaagtcctctatgctcagccaaaaaaaagaacaaaaaaaccatcagatctcgtgagacttattcactatcacgagaacagcacaagaaagacctgcccccatgattcaattacctctcaccatgtccctcccacaacacgtgggaattgtgggagctacaatccaagatgagatttcggtggggacacagccaaaccatatcaccgtgtaaaccagcattgtcctcccaagtaaacacctgtgatattctgtaccagaagcagaaccagaatttccagagttctttctattccataagtagattatttcatgacgactaaccctgtatctgataaaaataaataaataaataggccgggcgcggtggctcacgtctgtaatcccagcactttggaaggccgagtcgagcggatcacgaggtcagaagatcaagaccatcctggctaacacggtgaaaccctgtctgtactagaaatacaaaaaattagccgggtgtggtggtgggcccctgtagtcccagctactagggaggctgaggcaggagaatggcatgaacccgggaggcggagcttgcagtgagccgagattgtgccactgcactccagcctgggtgacagagcgagactccgtcccaaaataaataaataaataaataaataaataaataaataaataaatattttttaaaaaaacagactcctatttacatagaacaaaatgaaactgatgaaggaaatctgcttgtggttatttttaatattattgagaattgctttacaaatgttctttctttttatgcgcataggaagaagctcttttcctttcttcgtgacccactgccaactctcaatttaacatttatacttgaggaaattggaatgaaagcctctcagtagtatttttccatctgactcttccaaattctggaaaatatatcctgtgtcaaatctcaatataaattataaactgtccgggtgcagtggctcacacctgtaatcctaacactttggaaggcaggggtaggatgatgtcttgagcccaggagtttaagaccagcctgggtaatacagcgagaccccatctctacaaaaaataatttttaaaaaatattagccaggcgaggtggcacacacctgtagtcccagctcaggaggctgaggtgggaagagtgcctgagcccaggaaatagaagttacagtgagccatgattgcaccactgaactccagcctgggtaacagaccaagactgtctcaaaaaaaaaaaaaaattgtaagctaacaaatcatcagagactgaaatattataataattctaatcagaatgcagatgaatgcatttatgatgggtaaggcttagaaaaattataactgctccttagcaaagaacattggttgtgcttgaattttatggttataatgtatcaataaataactgaaccatatttatatatattatatctggaaagatccataatgattctgataaaaatatgaaaaacatcaactgactaagtagtcggtgcaactacttagaataatgggtagatattattacaaataacttcatcctttctgacaatgcagaataacttcatccatcctgacaatgtagcattttcatgagtttaatatgcattggctcccattgttgcaaggatatagacaaatcaaatgtactaccaaggctatactgacaatatcgtatgtgagaataaagccagttaatctagtcagaaaagcccaccattatggaacaaaggctgatgtgtagaacttcatttgtagaaccagatcctacaagccctcccaggaaattaaaccagtatatatgctgtggtttacaggatctcagtccagacttaaaggatcttgaaggaggaagaattcacccataaaagtaggcagcagggtgtggtggctcacgcctgtaatcccagcactttcgaaggcgatcacctgaagtcaggagtttgagactagcctggccgcatggtgaaaccccgtctctaccaaaaaatacaaaaattacctgggggtggtgacacatgcctgtgatcccagctcctcgagagcccaaggtgtgagactcgcttgaacccaggaggcggatgttgcagtgaaccaagattgcgccactacactccacctccaggtgacagagggagactccgtctcaaaaaaaaaagtaggcagtaaaagaaagttctattcgttccagactaatagagtccagtccaaatatacaactctagattccttacataatatccagacagaagctaattctctggttttagcagtgctcaccaccacataattctagatttactaaccatacaacaaggaggcctctgtgtgcaattaacacctcttgttttatctatgtaagtttaccaagccaaataggacagagcctacgctatataaaggtacaattcagagaccacatgaaatagccaccactgagtctgtgtactaatataaatgatatacaaacattattgatcattgggattgggaatatatgccacaaactaagctccaatttgttttctatttcccgtaacatttgtgagttatccgatattttaattaagaatagtacaaaccagaatcagaccaaccccttattttatcaatagctacctttagagataacatgatttcaggagctctgtgcaggaaacttattcaacacttggaaaataagacttaaaaatgattttcgtctggcgcagtggctcatatctgtaatcccagcactttgggagccgaagcaggtggatcacctgaggtcaggagtttgagaccagcctggccaacatttcaaaaccccgtctctactaaaaatacaaaaattagctgagcatggtggcgggcgcctgtaatcccagctactcgggaggcctgagacaggagaatggtgtgaacccgggaggcggagcttgcagtgagccgagattgtgccactgcagcctgggcgacagagcgagactctgtctcaaaaaaaaaaaaacacaaatggaaggaaggctggggctggggttgtggggcccaccccgtgtacactccacgtggcccagctgagagctcctcaggttgactcagagcacaggcagacaacaggtatcctaatttgcttccaacaccaaggccctggcgtatttcagaaaacctcggaaacaaaccctaaatgctcagcatttggaggcactaaaaacatgcacaaaacacacaagcattgagtgatttatttgccatgatctcttgctgctgttcagatccaagagacctcagggagaagggctgagcaggcaggggtgtccatccggccaccgcctctccctttcctcttgagggctctggggggtgttggactcacatgaataatcccagatctgaggacgctgacactgtcactgatgggacagaaagcagtcacgagaccaagtctgggctctcctggggcttccggtctactaggataagtggaaactaaataaacaactagaaatgcaatcatttcatggagcaaaaacacatgctaccaggaaagtccaactaggtgatgtggtggaaagtgactgcaggaggactctgctttaggtagcagggctggggaagttggtgacacctggcaggaaggaatacaaaggaatacaaaggaggtagccatggtgggcaaggggagtgacaagaggagaggcccaggcatggagaagagaagagaaagtgaaagtgcagagatttttgtttgtttgttttttgttttttgagacggagtcttgctctgtctcccaggctggagtacagtggtgcaatctcagctcactgcaacctctgcctcccaggttcaagcaattctccagccttagcctcccaagtagctgggattacgggtgcacgccaccatgactaattttcgtattttttgtagagacggggtttcaccatgttggccaggctggtctccaactcctgacctcaggtgatccacctgtctcggcctcccaaagtgctgggattacaggtgtgagccaccacacccggccagtacagagctctttagtgaagaaattggaggacttgaggatctgagagaggccagaggacagcccccagtgagcaagactcagtgagttctcaacttgaggcaggaagagatcaagatatagaggctcctattttatttcatgcataagacagagccttggagagtcttcaacaggggtgacaagacctggattgtgctttttttttttttttttttgtagagtctcactctgtcacccaggctggagtttagtggtgcaatctcggctcactgcaacctctgcttcccgggttcaagcaattctcctgcctaagcctcccaagtagctggaattacaggtgtgcaccaccacacccagctaatttttttgtattttttgtagagacagggtctcactgtgttgcccaggctggtctcaaactcgtgaactgaagcgatccacctgcctctgcctcccaaagtgctgggattacaggcatgagccatcatgcccagctggattgtgccttataaaagtccctttggctgaatgtagagagaaaatttgaggaaagcaggggtggaaatgagtggccagattagaaggctgtttgctcaagcaggagagagagcatcgtggcttgggtgagggtagggggagagggaggtagattcagatttgggattgattttggaggcatgactaacctgtgttctcacgaaaatggatttgtccccagagcaactacaagtctatgtgacatcaaggttcataagacaggagaatcaccaagggaaaaatagggccccaaccaataagacaaaaggaatagatgtaaggagaattggaacagggccctaagatctagaagtgctggtgttggaggtcaacagagtgtcattcactttgtcagccagcatttccacccctctggtttggtgtcagtgtttatctgctggctttctgcttcattcttagtcatcagcaccctcctttgtaccaccaggctagaagcctgcaaactatattgcccagcttcccttgtgagatggcttcccaataggttctgcttgcaggaagcaccacttctcaattctttctgcttctaggagggcctctggccacagccaaagaggtgaacaaggtcccagttcccactggtcatgaatttgtaatgtgtcaatttcattaagctgaaggaggtttcccacaagcctttccctatgcagctgaaagttagcatgggccccaggagacaacgtgcatgaatgtggaaggcagaagggaagcagaagccacatgcttttgtgttgggcaggtgggtgcaggcccaggcactgtggctgtcatgcacgttgtttgcaccttgaggctctccctggggatgtgaggcagcagccaggcccctacctctcccagctcccacaggatcctcctgcaggtacacatttaactccaaatcaaagagcagtgacttctcctggaagacatccgctcatgaaaattggagtcctggagactgtgagggtcccgtctgtctacatggcttcccactgatcctctcagttcgtcttccctggcttccccactttgtatcccatcttcccttcccaatacctgccctgctgacttcaggctgtaccagcagatgcagagagatcacccttacatagatggctcaaccagcttatgcaatgcatatggtcaaatccctatcacccatcccttatgaattgtgatattcagcttcctatatccatttacctagatgatatggtttggctgtgtccccacccaaatcttgtctccgaattgtagctcccataattcccatgtgttgtggagggacctggtgggagataattgaatcatgaggatggttcccccgtactgttctgtagtagtgaatacgtctcatgagagctgatgattttataagggtttcccctttcacttgattctcattctctcttgcctgccaccaggtaagacgtgacttttcccttctgccatgattgtgaggcctccccagccatgtggaactgtaagtccattaaacatcttttcctttataaattacccagtcttgggtatgtctttatcagtaatttgatcaaacactagtatccagttatttgatcaaacactaacctaggtgttgctatgaaagtattttgtacatgtgactgacatctactatcagttgactttaagtaaattatcctagataatctgggtgagcctgatccaatcagttgaaaggcctttgggggagcagaactgaggtttccctgaggaagaaggaattttgcttttgaatgacatcaactcctgcctgagagtttccagcctgccctgtggatcttggacttacctagccagcccctaaaatggcagaagcccattcatttgcaataagtaaatacataaatacataaatacatgtacacatatatgcatacatatatacatgtatgtatatatatgtgtatgtgcatatatcttagtctgttttgctttgctatcaaaaaaatacctgggctgggcgcggtggctcacgcctgtaatcccagcactttgggaggctgaggtgggtggatcacaaggtcaagagatcgagaccatcctggtgaacatggtgaaaccctgtgtctactaaaaatacaaaaaacaaattagctgggcatggtggcgtgtgcctgtagtcccagctactcaggaggctgaggcaggagaatggcttgaacctgggaggcggaggttgcagtgagccgagattgcgccactgcactccagcctggcgacacggcgagactccatctcaaaaaaaaaaaaaaagaaccaatctgagcctgggtactgggtaattcataaagaaaagaggtttatttgactcaccagtctgcagtgtgagggccacaggcttcttccactcatggcagaagtggaagggtagctggcatgtccaaatcacatggcaagagaatgagcaagagaatgggaagatgccagtctctttttaataaccagctcccaggggaactcttgcaggtgctaatagagagataactcactcactaccaagaggctgacaccaaaccaattgtgagaaattcacctccatgacccagacacctcccattaggtcccacccctgacattggggatcaaaatgcaacatgaggtttggagagtcaaatatccaaactccagcagcatatatgtgtatttatatgcatacgtgtatatatcatatctatatctcctactggttctgttcttctggagaaccaggactgatacctggatacgtatatgcatatccacatcttactcctcatcattctctttctctggctgacacctggctggtactttgctctcccagagcaaacccagagaagatattttattttgctggtatttcactttcctacttgctcttgagcatctgtcttttaaaagcttatatgagaactaacaactcttgttcatgcattcctgcatttattccacaaatctttttttttttttttttgagattgggtctcactgtgtcacccaggctggagtgcagtggtgcaatcttggctcactgcaacctctgcctcccaggctcaagtgatcctcctgcctctgcttcctaagtagctgggactataggcacatgacatcaggcccgctaatttttgcattttttgtagaggtggagtttcaccacgttgtccaggctggtctcaaactcctgggctcaggtgatctgcctgccttgacctcccaaagtgctgggattataggcatgagccattctgcctggcctactccacgaacttttgaacgccatgcacaaacatactctgtgctgtgctgtctgatgacacacaggttacaatactgataatggtccctaccctcacagacatcactgtccagtgatgggggaaagagagggagtggggagaagaatatttattagttatgtattagttatctactgccatataacaagtgtattagttatctactgccacataagaaattacaccaggccaggcattgcggcacatgcctgtaatcttggcactttgggaggccgaggcaggaggatcacttgagcccaggatgccgaggctgcagtgagccatgatcgtaccactgcacgccagcccaggcaacagagtaagacactgactcaaaaagacaaaaacaaaggcaaaacaaaaattacaccaacatgtattggcttaaaacaagaaacatttacgatgtcacaatttccagcagtcaggaatctgggtgagggtaactgggtggctttggctgtaggttcctcaaggctagagtcaaggggctggctggagctgcaggcatctcagggtggaaaatctgcctccagactcactcatggcagtgggcagccctcaggtccttgctggctgttggctggaggcatcagttccttgccccatgagcctctccccaggcagttcccataatggaagccccttccatagagcaagcaaggcaaggtggggaggaccagcaggacataaaccagtcttccagtaacctgtaccgggagtgacatcacatcacttctgccatatgctgtttgttagaagcttgtcactatgcccaatctacacacaaaggggtataggtcccagaagggcatgaataccacgaggctggaccactgcaggtcatcctaccataagtaaacatgttaagatgttaagataataaatatgaccatggctccacctggtgggaaacaatggcaaacagagtgacgaggtagaaagttctagttttaacagtttttttttttttttaaagaccaagtctcgctctgtcacccaggctggagtgcagtggtgtgatcttgatcttggctcactgcaacctccacctcccaggttcaagtgattctcctgcctcagcctcccgagtagctgggatcacaggcctgcaccaccacacccagctagttttgtatttttagtagagacagggtttcgccatgttggccaggctggtctccaactcctggcctcaagtgatccgcccacctcggcctcccagtgtgctgggattacaggcgtgagccaccactcctggccttagtttgaacagtttctgacttcatagttgtgttgccagataaagcaaggtcactcacatttatcatgaccaagtgagatttatcccagggatgcaaggatggttcaacatatgcaaatcagtcaatgtgatacatcatatcaatacaatgagggaaaaaaaccatatgatcatttcaattgatgctgacaaagcctttaatagaattcaacatcccttcatgataaaaaccctcaaaaaattgggtatagaaggaacatacctcaacataataaaagtcatgtatgacagacatacagctagaatcatactgaatggagaaaaactgaaagcctttcctctaagatctggagcaagacaaggatgcccacttcccccactgttcttcaacgtagtagtggaagtcctagctacagcaatcagaaaagagaaagaaataaagggcatccaggttggaaaggaagaagtcaaattatccttattcgcagataatatgatcttatatttggaaaagcctaagggcaaaagatcagaatagacatttttcagaagacacacaaatggcaaacaggtatatgaaaaggtactcaacatcaacatcattgaccatcagaaaaatgtgaatcaaaactacaacgagatatcacctcaccccagtcacaatggcttttatccaaaatatgtaataacaaatgctggcgaggatgtggagaaacgggaaccctcatacactgttggtgggaatgtaaattagtacagacactctggagaacagtatggaggttcttcaaaaaactacaaagagaactaccatatgatctagcaatcccatgctgtgtatatacccaaaaggaaggaagtcagtgtatccaagagatacctgcacccccatgtttgttgcagcacagttcaccacagccaagatttggaagcaagctgagtgtccaccaacagacatatggataaagaaaatgtggtacctatgcacaatgggtactgttttgttgtcgttgttgttattgttgttattgtttttgagacagagtctcaccctgttgcccaggctggagtgcaatggcacgacctcggctcactgcaacctccgcctcctgggttcaagtgattctcctgcctcagcctctggagtagctgagattacaggcgcacaccaccacgcccagctgattttttcttgtatctttggcagagatggggtttcaccatgttggggcaggctggtctcaaactcctgacctcaggtgatcctcccacctcagcctcccaaagtgctgggattacaggtgtgaaccaccatgcctggccacaatgggatacttttcaaccataacaaagattgagatcctgtcatttgcaacaacatggagggaaccagagatcattatgttgagtaaaatcagccaggcatggaaaaataaatgtcccatcttctcactcatttgtgggagctaaacattaaaacaattgagttcatggagacggagagtagaagaatggttaccagggactgggaagggtagtggagcagggggaagtggggatggttcgtagttataacaatgcagttaaatagaatgaataagttctagtatttgatagcacaacagggtgactacagtcaacaatacattttagggccgggcgcagtggctcacacctgtaatcacagcactttgggaggccgaggcggtggatcacctgaggtcaggagttcgagaccatcctggccaacatggtgaaaccctctctctactgaaaatacaaaaactagccaggtgtggtggcacacacctgtaatcccacctactcaggaggctgaagcaggaggatcgcttgaacccaggaggcagaggttgcagtgagccgagattgcaccactgcactccagcctgggtgacagagcaagactctgtctaaaaaaaaaaaagaaaaaaacaaacccatactttactgtacattttaaataactaaaagagtatatttggggtgtatgtaatacaaagaaattgtacatgcttgaggggataccccatttaccctaatgtgataattacacattgcatgcctgtatcaaaatatctcacgtatcccataaatgtatacacttactctgtacccgtaaaaacattttgggctgggcatggtggcgcacgcctgtaatcctagcactttgggaggccaaggcgggtggatcatgaggtcaggagatcgagaccatcctggctaacacggtgaaaccccatctctactaaaaatacaaaaaattagccgggcttggtggcgggtgcctgtggtcccagctacttgggaggctgaggaggagaatggcatgaacccggggggcggagcttgcagtgagctgagatggcgccactgcactccagcctgggcaacggagcgagactccatctcagaaaaaaaaaattttttttcaaaaagaattttttataaaaacatgtcacccagttaaatttgaatttcagataaacaacaaatacttttttagtatgagtatatcccatgcaacattttggatatatttatttaaaaacacctcattgtttatctgaactttaaatttaacttggctttctatctttttagttgctcagtgtggccaccttcctccagggcagcacagggctcaggagtggaggagccaggctagggactatggtaccaaaaccagccagcaggttagaggtgaggacgcaatgatgacaaactcctggagagggagacatggaggcaggatcagcaaaatgtcggggaagaggactgagcttttttttttttctttcttttgagacagagtctccctctgtcgcccaggctggaatgcagtggcacgatctcggctcactgtaacctccacctcccaggttcaagtgattcttctgcctcagactcccgagtacctgggactacgggtaagcgccaccacacctggctaatttttgtatttttagtagaggcagggtttcaccatattggccaggctggtctcgaactcctgacctcatgatctgtccacctcggcctcccaaagtgctgggattaaaggtgtgagccaccgtgtccggccctgagcttctttttaaacccataataaaccacatatttaatgtctttacattattgctgcctgagtcccccccatgagaaggaaaactccacaaaaaaacagggactgctgtctgatttgttcattgctgtgttcccagtacctagaagatgacttggcacctagcaggcgctcaagaaatgttgtctgaaggccaggcgtggtggcttatgcctgtcatcctaccactttagaaggccaaggtgggcggatcacctgaggttgggagctcaagaccagcctggccaacatggcaaaaccccgtctctactaaaaatacaaaaatcagctgagcatggtggcgggcatctgtaatctcaactaatcagaaggctgaggcaggagaattacttgaacgctgaaggtggaggtggcagtgagccgagatcctgccactgcactccagcctgcgagacagagcaagactccatcagaaagaaagaaagaaagaaagaaagaaagaaagaaagaaagaaagaaagaaagaaagaaagaaagagagagagagagagagagagaggaaggaaggaaggaagaaagagaaagaaagaaagagagaaggaaagaaagaaggaaagaaggaaggaaagaaggagaaagaaagaaaggaggaaagaaggaaggaaggaaagaaggaaggaagcaaggaaggaaggaagaaatgttggctgaagaaatgaatctttgagttgcttaaagaatctcagctctctggctcaggagtcaaggatgagaggaggacaggaggagatgagtctgctgggagagacagaggagtcatccctgggatggggatgtgagaggaacaggactggtgggggaagatgctgagatcaacttggacacggtgagtggaaagtacccagcagacatctggagagagacattcaggaatcccttgtctagccaagcctggagctcagagagagaactggcgtggtagacagaaaaatgccccctccaaggatatccacgttctaatccctagacttgtgaacagctttgctacttggcaaaatggactgtgcaggtgtaattaagctaaggctgttgatatggggtgattatcctagcgtacctgggtgggccattataaacacaatcctcacaaacacaatgctctttataagcgttatgggttgagtggtgtttcccaaaaagatatgctgaagccctctttcccagtccctcagaatgtgacctcatttggaaacagggttgttgcagatatgattaattaaatgaacataaagtcatggccaggtgcagtggctcaggcctgtaaacccagcacttcaggagatcgatggtagaggatagcctgagtgcaggagttctagaccagcctgagcaacatagcaagaccccctctctaccaaaaaaaaaaaaaatttttttttttttgacagagtttcactcttgttgtccaggctagagtgcaatggcacgatctctgctcacttcaacctccacctcctgggttcaagtgattctccagcctcagtctcccaagtagctgggattacaggcgcccgccaccactcccatctaatttttgtatttttaatacagacaaggtttcatcatgttggccaggctggtcttgaacttctgacctcagtgagctgcccgccttggcctcctgggattacaggcataagccacggtgtctggcctctacaaaaaaaaattttttttaattagctgagcgtggtggcacacacctgcagtcctagctacttgggaggctaaagcagaaggattatttaaaaccaggagtttgaggctgcagtgagctatgattgcaccactgcactccaggctggatggcagagcgaaaccctgtctcaaaaacaaacaaacaaaaaaaattcaaggtgttggcaaggccatactccctctgaaacctatgcccttatctctccattcaggtttcccatttatacctttggaatttgtagttattgatttccacacaattgcaaccaaggctgaatggggccccgggctccagccacagggctgggcatgacagccacactggaagtcatcagcacagagacaatgctgggaacatccctgagaagtgggagctcctgactgcccacacaagcaacagatgtcagccttgggcttttgtccttcaagctcaagtcatctctctgaccgtttcttgccagcctccccaggcacctcctcttccctcccctgagcatgatccgtggctgccctgtgcccaggccctcttgccatcttcacctgttctccccgatctcattcattctcaccacttctgtctctcattcctttccctccctgtgcatctctgtcctcagccccagtgtgttcaggtcttcttgctgctgtaatgaatgactacaggctaagtggcttaaacaatacaaatttgctctcttgcagttctgaggggtagaagtctagcacgggtcgcactgggttaaaatcaaagatgtgctccttctggaggctctagggcaggaatccccaacccccacgccacacactgtgatgtggtttggctctgtgtctccacccaaatctcatgtcaaattgtaatctccacatgcctgggggagggacctggtgggaggtaattggatcatgggcgcggtttcccccacgctgttctcatgatagtgaatgagttatcatgagatctgatggtttaaaagtgtgtgacaggccgggctcaggggctcacgtccataatcccagcactttgggaggccgaggcaggcagatcacccgaggacaggagttcaacaccagcctggccaacgtggtgaacccctgtctctactaaaatacaaaaattagccaggcatggtagctggcgcctgtaatcccagctattcagaaggctgaggcaggagaattgcttgaacacaggaggtaaggttgcaatgagctgagatcgtgccactgcactccagcctgggtgacagagccagactcctcaaaaaaaaaaaaaagtacatatatatatatatatatatatatatatatatatatatatatgatattatatatgagatacatattttatatatatgatatatatgatattgggaggccaggcacagtggctcatgcctgtaatcccagcactttgggagactgaggcaggtgaatcacctgaggtcagaagttcgagatcagcctggccaacatggcgaaatcctgtctctactaaaaattcaaaaacgtagttaggtgtggtggtgtgtgcctgtaacccccactacttggaaggctgagggtacaagaattgcttgaacccaggaagcggaggttggagtgagccaagatcacaccactgcactccaccctggcaacaaaatgagaccctttttctttgaaaataacttagaaattagctatgcaaagtggtgcaggcctgtagtcccagctacttgggaggctgaacaagaggatggcttgagcccagaaattcgaggctgcggtgacctgggatcacactacagcctgggtgagggtgagaccccatccctttaaaaaaaaaaaagaaagaaagaaagaaattaaaaacagccaggtgcagtggctcacacctgtaatttcaacaggttggaaagcagaggcagaaccacatgatgggaccttgtctctacaaaaaattaaaaaaaaaaaaaaaaagattgggtggcttaaacaacagacatttattttttcacagttctggaggctggggagtccaagatgaaggtgccagcagattcagttgttggtgaggccttgcttcctgacttgcaagcagacgcctttttgctgtgccttcccatggcctttccccagtgtgtgcacgtggagaacgtgagctctggtttctcttcctcttgttttttttctttctttctttttgagatggagtcttgctccatagcccaggctgaagtgcagtggcgtgatctcggctcactgcaacctctgcctccagggttcaagcgattctcctgcctcagcctcccaagtagctgggattacaggcacccgccaccatgcctggttaatttttttgtatttagtagagatgggctttcaccaggctggccaggctggccaggctggtctcaaactcctgggctcaagtgatccacctgcctcagcctcccaaatgttgggattacagggtgagccaccactcccagcctctcttcctcttcctataagggtactaatcctatcatgggggtcccagcctcctgacctgatctaaatctaattacctccaaagttccctgcctccaaataatatcacactgatggttttggcttcaagatatgaattcagagaggacacaaacattcagtctacaacactcaagcaagcagaaaatggtaagaataatatgatttctctttttcagtccattgtctgtgtgcgagatattcatgatcatacacattatgttcatatacatgatctcacttaccatgatcctgacgtagtaagttatctatcgctgtgtaacaaatcagcccaagatttactggttgatgtggtttggctctgtgttcccaccgaaatctcatctcaaattgtaatccccacctgttaagggaaggaggtaattggatcatggggatggtttccccatgctgttctcatgacagtgagatctaatgttttttgttttgtttttttttgagacggagtctcgctctgtcacccaggctggagtgcagtggtgcgatctcggctcactgcaacctgcgcctcccgagttcgtgccattctcctgcctcagcctcccgagtaactgggactacaagcgtccgccaccacacccggctaattttttttgtacttttagtagagacggggtttcaccgtgttaaccaggatggtctcgatctcctgacctcgtgatccgtccaccttggcctcccaaagagctgggattacaggcttgagccaccgcacccggccagatctaatggtttaataagtgtttgacagttcctccttcacatgacctctcatttcctgccatacaagacatccctacttccccttccggcattattgtctgtttcctgaggcctccttagccatgcagaactgtgaatcaattaaacctcttttctttataaattacccagtcttaggcagttatttatagcagtgtgaaaacagacaaatacactggtataaaacaacaatgggccaggcgtggtggctcatgcttgtaatcccagcactttgggaggctgaggcaggcagatcacttgaggtcaggagttggagaccagcctggccaacatgatgaaaccccgtctctactaaaaatacaaaaattagccaggcttggtggcgcacccctggaatcccagctacttgggaggctgaggtgggagaatcgcttaaaccagagaggcagagattgccgtgagccaagatcatgccactgcactccagcctgggtgacaggctgagactctatctcaaaaatcatcatcatcatcattatcatcatcatttgttatctcttgcagtgcctaggagtcaggaattcaggagcagcccagctagggagtggcagctctaggtctctaataagtttgcagtcagatagtggctgggtgtgggatcattttaaagctttcctaaattacatatctggtaccaaaggctccttggctcccttctctctccatagggtctctccaccatggtgactcagagctcccaaggcacaaatcccaagacagagagacccagggagtggctgtgtcaccttttctaatctagcctcggaaatcacttatcatctgttcatgagaagcaagtcaatagggctgcccgtattctagaggacaagaactggaatccacctttttattttttcaatttttaaatattttttttaggcagggcgtggtggcttacgcctgtaatcccagcactttgggagtccgaggcgggcggatcacgaggtcaggagatcgagaccatcctggctgacacggtgaaaccccgtctctactaaaaatacaaaaaattagccgggcgtggtggcgggcgcctatagtcccagctactcgggaagctgaggcaggagaatggcgagaacccgggaggcggagcttgcagtgagccgagataacgccactgcactccagcctgggcgacagagtgagactctatctcaaaaaaaaaaaaaaaaaaaaaaaaaaaaatatatatatatatatatatatgtatttttaaaatatatatttatttaatatatatttaatattttatatatatatatatttttttaatagagacagggtcttgctctgttgcccaggctggtctcctgggctcaaacaatgctcccacctcagcctcccaaagtgctgggattacaggtgtgaaccaccatgcctggccagaatccatctttgtataagaggaatttaaataaattgtagacacttattaaaactaccacagtaggtacttttttatgcccattttacagacaagaaaaccgaggcacagggaagctaagtaacttgcctaatgtcacataacttgggcttcacgcatggtggctcacacctgtaacccaatattttgagagtcagaggcagagggattgcctccaagaggcagaggcagcaggattgtaccaccaagaccagctaaggaggcaggaggattacttgagcctagaagttcgagacccgcctcagcaacatagtgagaccttgtctctacaaaaaaatgcttttaaaaattagccaggcatggtggtgcaggcctttgatcccagctactcggtaggttgaggcaggagaatcgcttgagaccaggaggtcaaggctgcagtgagccatgtacatgccactgcacttcggcctaggcgacagaggaaaaccctatcttaaaaacataagtaaattcatttaaaaattaaataaaatgcaagtctccaaccattaacaaagggagtgtcaaaaagtcatggaaaaaagggttttttaaaaaacaatttaaggaacataaagataacgtttaaaatgtaaaatagaagtgaatatattttttccctgcaactacactgaaagagatactgttttgcataataaaactgtctaaagaatctgtcctgataacgtaattgaaaatattcccaagaacgcctgtcttgttttgctgtgcggtcaggagccctgagttcctgtcaccacctggtctgttcatttaagacggtccttggaaagataattggaacaaaagaggcttgtgagattctcctagaaattgttgccaatcttgagaaaaataatctcccagagaagcctgcaattctgattggttttcttcctgatcatctgttgccatggtgacagccatcatctctctattattaaaaggaagaaatgactgtaggttttctctctctaaaccagaagacgatcgttggcacttttctcccacaaacataatggaaataaaagcctgtgactctgctagattttttcaaaaaaacaaagacattgagagtcctgtctcatttaaatgaatcaaagcactcatccccacgcacagatagacataaatggtggtagctgtgggcatcgcggttgtggtcggctgtcatcttcacttcatcagagcgcccactggtgggtaatgagagaacagcagggctatcccagctaggagacccccttccctcccttcctctctggagggttcaccaccccaaatagccaggcttgcagtggagggcagaactagggacagaaatccctggatattctaccaaggatgggaggatggcccctcctgctctcagcccccgtcatggtctcctattgtgtaccagacattgttctatcccctctacattctccatgctcactacaaccccttaagtggggaattatgactgccctacctacagatgaggattccaaaaccagagaggtttagtctcctgcccaaggtcacacataaactggaggacctatgagttattcaaacccaggtctctctgacagtaggcagagaacttcagcgtagagggaatgtggcgggactcaaaaggctcccaatccaccctcaagagagacttttcaggactgattgggtttatcagcaagaggcatccaacatccagctatctaataatcagggtgattcatggctaacagttattgagctctcatcaagtgctatgttctgggctaagtactttggatgtataatcccactaaatcctcctgacaaattttgggagaaaaattacgattgtgcccatttcacagaagagaagactgaggttcagagaggcccattatattgccccaggtcacacagctgggaagtattggagccaggtttgtaaactcgtgtttgcctggctccaaagcttctactcttctccagtagactatttagaaagaccagctttggatatgggtgtgggcctgactcaatgcagtaagtgctttctgggcccaagtaaaggccctgccattttccgatttgctgtttcgttttttgtattagttatttatggctgtataacaaatcaccccaagatccagcaatcccacaactcaatatacatacagaggaaatgaaatcagtatgtcaaagagatctccgtattcccttgttcattacagcactactcacaatagccaagatatggaatgaacctaagttgccatcaacagatgaatggataaagaaaatgtggtacatagacacaatggagtactattctgccttaaaaagaaggaaattttgttcctggcaacaacatagacaaatctggaggatactgtaagtgaaataacccagaaataagccagccaaataagccaaagaaaaacaaataccacatgatctcactcgcatggagattgtaaaaaagttaaagtaaatagggagtagaaaggtaatggttataggtggtggagggttgaggagatgttggtctaagggcacagatttttaattagataggaggaataagttcaagagatctattgtataatatggccactatggttaattacaactataattattctataattatctaattatactataatattcaagaatgtattttactcttgaaaattgctaagagaataaaaaatcacccccaaacctggcaacttaaaagaacaacaattatttattttactcacaaatctgcagtttagaggtttgtcagggacagttctctgctctgcaaggtgttagctgaatagcatcagaatctgctttgaagaagacaactactttcctagctattttctgggaagtgtgagcttgggacctcattcctattcatatgatcctttcctctggctccttgaacttcctcacaacatggtggctggattccaagagcaagcattctaagagaacaaggcatgtctttttttttttttttttttttgagacagggtctccctttgttgcccagactagtcttgaactcctgggctcacacaatccgcccacctcagcctcccaaagtgctggaattacagacatgagccaccatgcctggcctatgcatagcatttgtatgatccagctttggaagtcatatcatcgcttccactttattagtcaaggcagtagggactgctcaagctcaagggaagagacatagaccccatctcttgattctagaagcatgtggaataggagatattattgtcgctatctgtagaaagtaaaatctgacatactctcaaaggcagtgtagggtagactggaatatcccacttggtccctcgttgcccactctctgggaaaagggggatgttttactgcagaggatgggagggtgaagacccagcaaggtcttggccttggagctctaagaatccaagaatctaataatagttttagggacaagagggtcacttggagagaaggtgtctctttgggggatatttaaggatccatgggctggacctgccttttattaaataactactaaagatctctagataactcatggctagctctggaagaagatcctagacatagcacgaaggtcaagatcctagacattggggccaggtaggccaccgtcccagttccagctatctatgtattccttggtcactatctatgtattccttgtctgctgcagcctcagtttcctcatttgtaaaattggtataaaaataatatatagtacaggaccgggcacggtggctcacgcctgtaatcccagcacttagggaggccgaggcaggcagatcttgaggtcaggagatcaagaccatcctggcgaacactgtgaaaacccatctctactaaaaatacaaaaaaaattagccgggcgcggtggcaggcacctgtagtcccagctactcaggaggctgaggcaaaagaatggcatgaacccgggaggcagagcttgcagtgagcagagatggcgccacggcactccagcctgggcaacagagcgagactccatctcaaaaaataataataataataagtagtagtagtagaggttaggtgaagcctgagacctggtggtgtatgagccagagcagaatccagagtaaaacccagtattgttgttgcctcaggccctctgtggccagcatctatctccatctgtgccatcagtgcctgcccctataggggcactagctgttccaaccgggtcaccctggctgaattgaagataacttataaaaagccacatcttggctgggcgcggtggctcacgcctgtaatcccaacactttgggaagctgaggcaggtggattacctgaggtcaggagttcaagatgagcctgggcaacatggtgaaaccccgcctctactaaaaatacaaaaattagctgggcatggtggcacacacctgtaatccccacgtacttgggaggctgaggcaggagaattgcttgaactcaggaggtggaagttgcagccagccaagatcgcgccactgcactccagcctgggcgacagggtaagactccatgtaaaaaaaaaaacaaagagccacaactttaaagttgtggaaattggatgccattaacattgtcaacaaaagtttttgaaataccagccgggcgcagtggctcacacctgtaatcccagcattttgagaggctgaggaaggtggatcacctgaggtcaggagtttgacaccagcctggccaacatggcaaaactccatccctgcaaaaaatacaaaaattagcagggcatggtggcatgcacctgtagtcccagctactcaggaggctgaggcaggagaatcgcttgaacccaggaggcagaggttgcagtgagctgacaccattgtactccagtccgggcgacagagcaagactctgtcaaaaaaataaaattgaaatatctaagaataaggccaggtgcagtagctcatgcctataatcccagcactatgggaggccaagataggaggattgcttgaggccaggagttcgaggctgcagtgagctgcgattgcaccattgcactccagcctggataacagaacaagatcctgtctctaaaaaataaaaagaaaagtttaaaaaaaagttttttaagtgaaagacaaatcagatcaatgaaaatgaacacatgatatacaaaaacatatgggatacactaaagtagtgcttggaggaaaatttacagctgcaaattgcctatattgaaagagaaaaatggtctcaaatcaataacctaatcttccatcttaagaaactagaaaaagaagtgcaaactaaacccaaagcaagcagaaggcaggaaataataaagattagaaaggaagtaaatgaaacagagaaaagaaaaacaagagaaaatcgaccaaaccaagtttggttctttgaaaagatctacaaaattgacaaatctttaactagactaaccaagggaaaaaagaaaagtctaaaattattaaagtcaagaatgaaggaggagacatcactactgaccttacacaaatacaaaggcttataagggaataccatgaataagtgcgtgccaacatattagatagtctaggtaaaatggtcaaattcctagaaagacacaaactatcaaaactgactgaaaaatatagaaaatctgagtacacctataacaagagattgaaatggtaattttaaaagttttcacaaagaaaagtccacaatcagatggtttcactggtgaattctaccaaatattcaaagaagaatcaacacaaatccctcacgaatgtttttgaaacatagaacaagagagaacacttcctacctcattccatgaggtcaatattaccctgataccaaaatcaaacacatcgtaaaaaaagaaaaccaaaaagagaccaatatcctttataaatatagataaaaacattctccaccaggcgcagagaatcaaacctgtaatcccagcactttgggaggccaaggtggacggatcacctgaggtcaggagttcaagaccagcctggccaacatggcaaaaccccgtctctactaaaaatacaaaaattagccaggcgtggtggcgtatgcctgtagtcccacgtacttgggacgctgaggcaagagaattgcttgaacccaggggttggaggttgcaatgagccaagatcatgccactgcactccagcctgggcaacagagagataatccatctcaaaaaaaaaaaaaattctcaacaaaatactacgaaactgattccagaaacatataaaaaggattatatgccatgaccaagtgagatttattttaggaatgcaagacatgaaaattcatcagtgtaataaaccatattaacaaactaaagaacaagaagtacatgatcatctctgcaggtgaaaaaaaagcattttacaaaaaatccaacattctttcatgataaaaaattaaaactcaataaactaggaatagaatgaaatttcctcaacctaataaagggcatttatgaaaaacctacagctgacattatacttaattatgaaagactgaaacctttcccctaagatcaggcacatgatcagatgtctactcttattgtgtctatttaacattgtactgggagttctagccaggacagtcaggcaaggaaaaaaaaaaaaaaaaagcatccaggcagacgtggtggctcatgcctgtaatcccaacacaatgggaggccgaaacagccggatcacttgaggtcatgagtttgagaccagcctggccaagatggcaaaaccctgtctgtactaaaaatacaaaaattagctgggcgtgatggtgcatgcttgtagtcccagctacttgggaggctgaggcaggagaattgcttgaactgggagatggaggttgcagtgagctgagatcatgccactgcatgcactccagcctgggcgacagagcaagactctgtctcaaaaaaaaaaaaaaaaaaattcagactataaaggaagaaggaaaactctatttgcaggtgacataatcttacacataggaaagtcttaaggaatctacacacacacacacacaactactagagctaattaacaattttagcaatttttcagaatacaagatcaatatctaaaaatcagttgtatttctgtatacatcagcaattaacagtctgaaaataaaattaagaaaacaattccattcgtaatagcatcaaaaagaataaaaggcttaggtatgaacttaagaagactttgtaagaattttacactataatgcacaaaaccaacatcaaaataaatgttaacagacatagataagtggagagacactctgtgtttatgaattggaagatttaatattgtttagatggcaatattccccaaatagaactgcagattcaacacaatccacatcaaaattacagctgccttttttgtagaaattgacaagctgattttaaaatttatatgaaaatgcaaggaatccagaatagccaaaataatcttgaaaaggaacaaagtcagaggacctacacttcccaattttaaaacttactactaagctgagtaatcaagatttttggtacttacataaacacagaggaatgagagtctattttaaaaactcatatgtctatagtcaactgattttcaacaagggtgccaaaaaaatcaatgaagaaattcaatgccttttcaacaaatggtgctggcacaattatatatccacaggtaaaaacaggaagttggacccctgcctcacaccacatatacaacttaacttgaaatggatcagaggcctaaatgttaagagttaaacctggaaaactctcagaaaacatagatgtatagtcgtgcgttgcttaacaatggggatacattctgagatatgtatcgttaggtgatttcatcattgtgcaaacatcatggagtgtacttatccaaacctaaatggtagagcctactgaatacgtgggctagaggataaaacctattgctactaggctacaaacctgtacagcatgttactttactgaatattgtaagcaatggaaacacaatgggtatttgcatacctaaacatagaaaaggtatagtaaaaatacagtattataatcttatagaccaccatcatgtatgtggtccatcactgaccaaaatgtcattatatggtgcacgactgtatatctttgtaaccttagatatgacatcatggcttcttagatattacatcacaagtacatgcaataaaaaaatacatacaaattagacctcatcaaattttaaattttgtgcttcaaaagacactattaatgaagtgaaaagaaaacctacaggatgggagatttgcaaatcatctgatacaatctgataagtagtgtctagactccagaatatataaagagcacttacaattcaacagcaagaagacaaataactcaattttaaaatgggcaaaagatctaagtagacatttctccaaagaagatatataaatggccaaggagcacataaatatatacctaacatcattagtcattaaagaaactaaatggatgagccaggcacggtggctcacacctgtaatcccagcactttgggaggccaaggcaggcagatcacctgaggtcgggagttcaagaccagtctgaccaacatggagaaaacctgtctctactaaaaatacaaaattagccaggcgtggtggcaggcacctgtagtcccaactactcaggaggctgaggcagtagaaacggttgaacccgggaggtggaggttgccatgagccaagatcgcgccatcgcactccagtctgggcaacaagagtaaagctccgtctcaaaaaaaagaaattaaatggatggattaaaatggtggccactacccaagtcaaatgaaatcttccccctccatggtccctggacaagggaatgttactcttacaaatcttctgttgacaatacattttgattgtttgggttttttgtttgttgacaaataattgcatatattcatgggaaacatagtgatatttcaataaagaaaatgtatgatgatcagagcagggtaatttcatgtcctttgtgaaaggaaaataaatctcctccagaaatcactaagccaaagggaaaagtcaagatgggacatccatcaggcaaacatgcctcctgttttattcctaaataagataactacaaaaatttaaaaagctacacagttccctcaaaatatgtcagaaaggaaatttcttgtgagcctcaagatctttatcctgaaacagttctgttgaatttcaccctggcaatgtaaattgataactgataccttatcttcacagatgggggacaaaggacagacagaacccaacgccatccctcttctcacctgagacaaatgcatatctgatggcttcctctgcccagttgtttatgtaaaaatgcagattcactaagcgagactcaggcataagtgactactcctctatggcgtctcacatataaattgtgtattcagtgaaagacttatcagagactcaaaagaatgcaactgttggtctcttatctatctgtgacctggaagcaccccaccccccaaccctggtaggtgcatcaagttgtcccatctttccagacagaaccaatatacatcttacatatattgagtggtgtccatgtctccttaaaatgtataaagtgaagctgtgccccaaccgccttgggcacatgtcatcaggacctcctgaggctgtgtcacaggagtgtccttaaccttggcaagataaactttctaaattgattgcaacctgtctcagatacttttggatcacacctctaacaagcctccccctatcccttcccaccctctagtatcctacatttttgagtggtagaagttccaagctaggaggaattggtcttaaagatagtctaacaacattctcaaattttaggatgtttccaagtcatctggagggcttgtcaaaacacatatttctggagcccaatcccagagtttctgatttagtaagtctggggtggggcccagaaattggattttctcaaaagtttacagttgatgctgatgcagctggtgtaaccctttccttctacacatatgaaagctggctccaacagagatggtgtgaatggtgcagctagttgtacaaagtgctgtccagtaagaaccttctgtgatgatgtacatgctcttctgtcctccccaacaccgtagccacatgtggttactgagcacttaaaacgtggctagtgcaactgagacttcatatttttaatgcaattaatcttaatgaattttaattcatatgatcgcatatcatacttactagagtaagtaccatgttggacaccacatttctacaagtgaggtctcctgactcccaagccagtaaactttctaatacacagtactgccttctgttttcaagccactaaggatgtatgcaagaggagaatctctaggtcttagtaaacctacatgctcaacttgccaatagacattgtcaaatggttgtctgtggctgagaccatggtatacactcaccaaattctgtttccagttccttcttcaaaggcacatgagaaaatatatttctccatccacttgcagtgagatgagaccacacgactggttctggacaaggaaatataagctgaagtgacatatgtcacttctagaccgaggcaatgaaaacctcctgagagattttcttttttttgttgttttttttcttttttgagacggagtcttgctctgtcgcccaggctggagtgcagtgacacaatatcggttcattgcaagctccgcctcccgggttcatgccattctccttcctcagcctcctgagtagctgggaccacaggcacccgccaccacgcccggttaatttttttttcttttttgtatttttagtagagatggggtttcaccatgttagtcaggatggtctcgatctactgacctcgtgatccgcccgcctcggcctcccaaagtgctgagattataggcgtgagccaccgcgcccagcctgagagattttctcatctctctctccccagctctggcagcatagaggcctttaggagagatgaaagatgctaggttacagggttaacacatggagctggcctgaagagtagctgggatttacagtggactttgtgtgaatgagagataaactttaattgtgctaactgagatttttgaagttatttgttactgcactgtgacctagtctatcctaaattatacactcgctggcatgattgtatcaatactcccatcagcattttatgagaatttccatctccccatacttatttatttattcgaaaaatagttattggccaggtgtggtggctcacacctgtaatcccagcactttgggaggccaaggcggctggatcacctgaggtcaggagttcgagaccaacctggccaacatgatgaaaacccatctctactaaaaatacaaaaaattagccaggcatggttgcggatgcctgtaatcccagttactcaggaggctgaggcaggagaatcccttgaacccgggaggcggaggttgcaatgggcagagagcatgccattgcactccagcctgggagatagagagagactccatctcaaacaaaaataaagttattgatagctgggcctggtggcatgcacctgtagtcccagctacttgggaggctgaagtgggaggattgcttgggcctgggaggcagaggttgcaatgagccaagattgcaccaactgcattccagcctgggcaacatagcaagacactgactcaaaaaaacatagttattgagcacctactatgttcctgggtctattttaggcactggagatacaacagcaaacaaaatagacagaaaattgtgacctcatggaacttatattccagtgaaagaatcaaacaataaatataatgaaaaagaagataatattatattttattttagcaggtgggcactgctatgaaaaacattaaagccaggtaaagggaattgagagcattgggttgcaatttttttttcttttttaaattttatttctttattgatacataacagatatacatattttcagggaacatgcggtaacttaataaatttatataatttgtaaagaccaaatcagggggccaggtgtggtggctcatgcctgtaatcccaacactttgggaagccgaggtgggtggatcacaaggtcagaagttcaagaccagcctggccaagatgatgaaaccctgtctctgctaaacatacaaaaattaggctggcatggtggtgggcacctgtaatcccagctactcgggaggctgaggtagaaaattgcttgaacacgggaggcggcagttgcagtgagctgagattgcaccactgtactccagcctgggcgacagagcaagactctgtctaaaaaaaaaaaaaaaaaaaaaaaaaagatcaaatcagggtaattaggatattcatcaccttaaatattcatctttatgctaaaaacatgaagtcttcttctattattctaattttgaaatgtacaacagattattgtaaactatactcaccctactgatctatcaaacaccagatcttatttcttccatcttacatttcttccaaatgtagctatacatttgtacccattagtcaatttctcttcatttcccccctccaccctacccttcctggctactggtaggaatcacctatctgctctctatcttcatgagatccactttttcagcacccacacatgaatgaaaacatacgatatttgtctttctgtgcttggcttatttcacttaacatgatgctgcaaatgtcagaatttcattcttttttatggctgaataatattccattgtgtacatatagcacattttttctttttttttttcttttgagacagcgtctctctctgtcacccaggctggagtgcagtagcgcaatctcagctccctgtaacctctgcctccagggttcaagcaattctcgtgcctcagcctccctagtagttggaattacaggcatgagccaccaccggttaatttttgtatttttagtagagatggggtttcaccatgttgtgcaggctggtcttgaactgacctcaagtgatccacctcccaaagtgctgagattacaggcgtgagccacctcactcaaccatataccacattttctttatgcattcgctctttgatgggcacttagattgactccattatcttggttattgcagcaaacagtgctgcaataaacatgtgaatgcaaagagcatttctccagtgttttcctctggtagtttcatagtttcagatcttagatttgagtctttaatagatttttgtttaattcttggatacagtgacttccttccttttgggtgtattcatagcatgggattgctggatcatatggtagttctatttataattttttgaggaacctccatactgttctccagagtggctgtactaatttacattcccaccaacagtgtatgagggttcccctttctctacgtctttgccagcatccacctttttataaaggccgttttaactggggtgaggtgatagctcactgtagctttgatttgcatttctctgacaattagcgatgttgagcatttttgtatataccccttagccatttgaatgtcttcttttaagaaacgtccattcagatcctttgctcactgtattagtcagggttctctagagggacagaactgataggatagatgtatatatgaaggggagtgtaataaggagtattgagtcacatgatcacaaggtgaataggccgtctgcaagctgaggagcaagaagccagtcccaaaacctcaaaagtagggaagccgactgagcatggtggctcaagcctgtgatcccagcactttgggaggccaaggaaggtgaatcacctgaggtcaggagttcaagaccagcctggccaacatggtgaaaccccatctctactaaaaacacagaaaatagtcgggcatggtggtgcacgcctgtaatcgcacctactcgggaggctgaggcaggagaattgcttgaacccgggaggcagaggttgcagtgagccgagatggtgccactgcattccagcctgggtgacagagtgagactccatctcaaaaagaaaaaaaaaagtagggaagctgacagtgcagacttcagtctgtagccaaaggccctggcaaatcactggtgaaagtccgcacgtccaaaagctgaagaacttggagactgatcaagggcaggaagcatccagcacggaagaaagatgaaggccggaagtctcagcgagtctgcccattccattttcttcttcctgctttatcctagccgtgctggcagctggtgggtacccacccagattgagggtgggtctgcccctcccagtccactgactcaaatgttaatctcttttgggaacacactcacagacacatccaggaacaatactttgcatccttcaatccaatcaagctgacactctgtattaaccatcacacccgtttttgtttttttgtttttgtttttttttttgagacggagtctcgctctgttgcccaggctggagtgtggtggtgtgatctcagctcactgcaacctctgccttctgggttcaagcagttctccctcctcagcctactgcatagctgggattacaggcatgtgccaccacacccagctaatttttgtagttttagtagagaagaggtttcaccatgttggtcaggctggtcttcaacccctgacctcaagtgatccgcccaccttggcctcccaaagtgctgggattacaggcgtgagccactgagcccggcccacacccactttctaactagatttttttttcctgttgaattgtttgagctccttatatattctggttattaatcccctgtcagatggatagtttgcaaatattttcttccattctgtggtgtgcctcttcactttgtttattgttccctttgctttgcagaagctttttgggttgatacaatcccatttgtctattttcacttcgttgccggtgcttttgaagccttacacaaaaaatctttgcccagactaatgtcctggagcaattccccaatgatttcttctggtaatctcatagtttcaggtcttggatttaagtctttaatagatttttgtttgtttatttatttatttttattttatatatatatttatttatttattgagtcagattctccctctattgcctaggctggagtgcagtggcacaatctcggctcactgcaatctccacctcctgggtttgagcgatcctccagcctcagcctccccagtagctgggactacaggctcacgctaccacacgcagctaattttccagagcatcccaactggaaaggaagaagtcatattagccttgttcatagatgacattttttttacaatagctttatttattattttattttttagagatagggtctcactcactctatcgtccaggctggagtgcagtagcaccattatagctcaccgcagccttgatctcctgggctcaagtgacctccctgtcttagtctcctgagtagctaggactacaggtgcaccccactatgcctggctaattttttaattttgttgtagaggttgggtcttgctctgttgtccagtgtggccttgaactccttgcttcaagtgatcctcctgccttggcctcctaaaatgctgggattacaggtatgagccacctgggcaacacggcaaaacctcatgcctggcctgatatgatcttatactcgactccaccaaaaaactgttaaaactgataaacaaattcagtaaagttgcaggatacaaaatcaacatacaaaaatcagtagcgtttggccaggtgcagtggcttacgcctgtaatcccagcaatttgagaggccgaggcaagtggatcacctgaggtcaggagttccagaccagccttgccaacatgttgaaagcctgtctctactaaaaatacaaaaaattagctgggtgtggtggcgggcgcctgtaatcccagctacctgggagcctaaggcaggagaatggcttgaacctgggagacagaggttgcagtgagccccgagatcacaccattgcactccagcctgggcaaaaagagcaaaactctgtctcaaaaacaacaacaacaaatccaaaccaaaaaaaaccccaaatcagtagcatttatatatgccaacagcaaacaatctgaaaaagaaatcaagagagcagtcccatttacaatagccacaaagaatataaaatacctaggaatcaatttaaccaaagaagtaaaagatctgtacaaggaaagctataaaaacactaatgaaagaagctgaagaggacatacacaaaaaattgaaagatatttcatgctcatggtttagaagaattaattttgttaaaatgacaatactgcccaaaggaatttgcagatccagtgcaatccctatcaaaataccggcgacattcttcacagaaatagaaaaaacaatgctaaaatttacacagaaccacgaaagaccccaaaatagccaaagcaatcctgaacaaaaagaacaaagctaaaggcatcacactacgtgacttcaaaatagacgacaaagctatggtaaccaaatcagcatgatactggcataaagacagacatgtagaccactggagcagaatagaaaacccagatataaatccacacatttacagccaactcattgtcagcaaaggcaccaacaacatacaatggggggagaacaatctcttcaataaatggtgctgagaaaatcggaaaactgtacgtagaagaatgaaactagagctgtagctctcaccatatacaaaaattaaacaggccgggctcaatggctcatgcctgtaattccagcactttgggaggctgaggtgggtggatcacttggggtcaggagttcaagaccagcctggtcaacacagtgaaaccctgtctctactaaaaatacaaaaatagccaggcgtggtggcaagcacctatagtcccagctactcgggggctgaggcaggagaatcgcttgaaccaggctgcagggagccaagatcgcaccactgcactccagcctgggcaacagagcgagattctatctcaaaaaaaaaaaaaaaaccaactgtgttatcctctcactgaatatacccctttatcattgtacagtgacctgctctgtttcttttcacaagcttggaattgtagtctcttttatctgataccatatatagataccaagtatagctacccctgcttttttttttttttttttttttggtttccagttgcacggaatatctttctctaactcttcactttcagtctaagtgtgtctttataggtgaactgggtttcttgtagacagcatagagttgggccttttttcttttttctttcgagacaaggtttgtggcccaggctggagtacagtggggaaatctcggctcactgctatctccgcctcccagtatcaagtgatcctcccacatcagcctcctgagtagtcaggaatacaagtgcacgccagccaccacgcccagcaaatttttttttttttttttttggtagagacgaggttcactatgttgcccaggctggtctccaactcctgagctcaagcaatcttcctgccttggcctcccaaagtgcttggattacaggcatgagccaccatgcctggcctgggtcttattctttatccattcagccactttatgccttttaattggataatttatttccttaacattcatgttattattgataagtaaggacttactactgctattttgttgcttattttctggttgttttcttccttcttttttttttttttgagacagagtcttgctctgtcgcccagtcatgactgcagtggcgcgatctcgactcactgcaacctctgcctcccgggttcaagcaattctcctgcatcagcctcccgagtagctgggactacaggcacccaccaccacactcacctaatttttgtatttttagtagagacggggttttgccacgttggccaagtggatctcgaactcttgacctcaagtgatccgcctccctcggcctcccatagttctgggattacaggcgtgaaccaccatgcctggccccctttttttctttcttactgtcttcctttgtggttaagtgattttctctggtagtatgttttaacttgttactttttatttttattgaatctattataggtttttgcattgtggttaccttaaggcttataaaaaaatcttataacaagttttttgttttttgtttttttttgagatgaagtttcatttttattgcccaggctggagtgcaatggcacaatctcggctcaccacaacctccgcctcccaggttcaagcgattctcctgcctcagtctcccgagtagctggaattacaggcatgtgccaccacgcccggctaattttttgtatttttagtagagaagcggtttctctatgttagtcaggctgatctcgaactcccgacctcaggtgatccgcctgcttcagcctcccaaagtgctgggattataggtgtgggccaccgtgcctggcccccttttttcctttcttactgtcttcctttgtggttaagtgattttctctggtagtacgttttaacttgctactttttatttttattgaatctattataggtttttgcattgtggttaccttgaggcttctaaaaaaaatcttataacaagttattttaaagcgataacatcttagatcacaaagaaaaaaatagaaacaatgaataaaaactccacactttatctccttccctcccacattttgactttttgtttcctcaatttacatatttttattttgcttgtcttttaacaagctgctatagctattattgttttaattatggggtcttactgtgttgctcagactggcctcaaactcctaggttcaagtgatcctcctgcctcagcctcccaagtagctgagactacacccagctcaatattattgtttttgatagatttgtctttgaggctttatggtagagttaagaatgaattgcataccacaattacagtattggagtatcctgggtttctctgtgcacctaattttaccaatgggttttataccttcaaatattttctttggccaggaatgatggctcacacctgtaatcccaacactttaggaggccaatgggggaagactgcttgagctcaggaattcgagaccagcctgggcaacatggcaaaaccccatctctaccagaaagaaaatacaaaaattagccaggcatggtggtgtgcacctgtagtcccagctactcaggaggctgaggtgggaggatcactggagcctggcagtttgaggctgcagtaagctatgattgggccactgcactccatcctgggtgatagagcaagatcgtgtctcaaaaaaaattttttttctttttgcatggttttttttttttccggattgaggaactctctggaactgtctttcttcaagagagcatttcttataatacagatctggtagtggtgaattctctctgcttttatttgggaaaaactttatctcttcttcatatttgaataatagctttgcttgatacagtattcttgtatggccttcatggttttgattgagaagtctgtggccaggtaaattagagctcttttaagtgttatttccttcttttctcttactgtttctaggatcctctctttgttcttgacctttgagagtttgattattatatgccttggggtaatcaaatctatttggtgttctctggcctttctgtacctggatatttgcaatttttgaatgtcttccattgtttctttgaatatcctttctatccccttgctcctcctcagctccctcttgaacaccaataattcttagattttgtcttctatatttcgtaggtgatttccattcctttcattcttttttcttttttcttctgtatgtatttacaaacagcccgtctccaagttcactgattgtttcctctgcttgacccactctgctgttgagaacctctaatgaacttttcagttcagcaaatgtatttctcagttctaagatttgtttgggttttttttaaattattatttcaatctctttgttaaatttcactgataaatttctgcgttgcttttctatgtcgtcttggaattcactgagtttccttaaaaatgccattttgaattcttagaaagctcacatattactgtcttgttaggtttagtcactggtcccttacttggtccatttggggagctcatggttccctgtttgctttggtttgttgttaatgtacatctatgcctttgcactgaaggattagtcacttattccagccttctccgtctggcttgttttggcttttactggctccatttgcttacagattcttcgtaattgacctgttggtttctttttttctgctaggttgctgcctcctttttagcactcagtggcaccttaaaaccaggtttgccttggctctattaaagatcagagcgtctcccatcccgaatgggggaggtcccaaaggggatatcccagtagcataggaaagctggctaggggttcattcccaggggagctatggaagaaacctcccacagcatggtgctaacgaacagccactctgatttggcatctcctttggccaagttatagagtagagagagtttccagggctggggatggtagtcccacctccccactttgtctgtggctattctcagaggatatttctcccttgaggcactcctgatggttgtattcttgtgattacagcactttgggaggccaaggcaggcggatcacttgagctcaagagtttgagaccagcctggccaacatggtgaaaccctgtctttactaaaaatacaaaaattagccaagtgtagtggtgggtgcctgtagtcccaactacttgggaggctgaggcaggagaatcgcttaaacctgggaggcggaggttgtagtgagccaagatcatgccactgcactctagcctatgtgacagagcaagactccgtctcaaaaaaaatacagatcttgtgtgaactaacagaataagaactcacttgttaccgtgaggacagcaccaagtcattcatgagggatccacccctatgacccaaacacctcccaccaggccccacctccaacattggtgatcacattttaacatgagatttgagactgagtaacaagtgttaggattaaaggcatgagccaccgcgcccggccatcttctttacctctccactgtgtcagttttatttttctcttcttctctagacactttgttcctcaagatagggggcagagtgggaaaatgaccatagtcagaatctatgggaaggacccacccaaaaggaaaaggcttcttgtgcccaggctgcagatccaaaccccagggaaggactctcattggttcagtctccattctgttccaggtggagcataatgattggtccagcctgactcgtttgcccatctcttaaccatcaacatggtggggaggggacacgcaggagactgtcagctcctatcctaaacgggggagggggcaggggtgatcattttctgagctcctataaacaaagtttcagttctttttcctcctatggctggaacactggaataaggaaagaggtcgtctgtctggagaggctggttggggagtatggtctccccagcccagccaagctcaggtccctgcatacagcaggcgcctaattgatgcttatagcacgaatgactgaatgaataccccgttcccacaggctgtcctgggatggtcctaatttcacagaccctgagcggatcaagaatgaagcgggcccaggggtcccgcccaccggctgagtgcgtcttaggacgcagagacaagaccacggagggcggaacctctgagcgttaggtggcaccttggagaccccgccacctccaaaggcccagttaggggcggagcttctaaaccctagcattttggattgaaccatcgtccgtcggttaaaggggagagccgagaaagcccttctgcatttgtcgccagcctttttaccacctcctggccacagaaacgacgtatttgcttctctaacggcgacgccgtttcccccttcgcctcgttactcctcaaagccccacgcggccacagagttcagacttacccaccaccaccttgcagtggctcgccccagtttgacgcattgcagggaaggtcggaccaatgggcgccaagctctcatttccgccatgggccaggcccaatagtgacgcggctcacagagggacgcgtcacgcaccgccgagctgtgcccctccgccgaagaaagtgaagtgggcccgggaggcggggcgcgcggcgagggaaagtagtccggcgacgggagcgagcgcgcgcgcgcccggcggcaaacccaattcctgtgcagggtggggacgagagattcgcgggcccgtaggtgtggagcggggcgcggagggatccgtgggagccgcagtgcggcggcgcgcgggccgggtggggcggggccgagcgaggcggggcgcgcgcggcggccgttgagggaccgttggggcgggaggcggcggcggcggcggcgcgcgctgcgggcagtgagtgtggaggcgcggacgcgcggcggagctggaactgctgcagctgctgccgccgccggaggaaccttgatccccgtgctccggacaccccgggcctcgccatggtgagtgaggctggggggtcgccgaggctgcgggctctgaggcgggcttaacggggcaggacccctgagggggcgacagagcccagagtggggggcgtccgggcccggcgagagcctcgggacccttttctacccgcgttgtcgggggctgttgaacccagagcgggacgtctggatcaccagaggtttccagaagcgactttagcaccaaatgggatgtttaagtccacaaatgggtatctgagcccctaaaggggacatttgaaccccggatggaggatcgggaccctcagtgggacccctcaaaaggattttggacccaggatggggcgttgggtttcaggatggaggtgtttggaccccaggggacgaaataagaaagatgggctggggaggggagctattcgggccctgatgaaggcgtttggtcctgagaggatgcggggaacgggggacgaagggaggctgggctgctcctggatggggtggtggagggtagctgggcccgggcggggaggggcgacccctgggctcctgtggagcagaggagagggtcaaggatgggcggtcacttctacagatgagactcccgagggtgggggagggtgggggagggtggtctccagagcccagcactgcagaggaggaggagggtgaggtgcaagcttatgggaggaagagcctggggtgggtggcagcggagattagaagatactcttgaaggcttccgggacggagaaggatcagggtcgtggaggtggtgaaaagggatggtgagagtggggctcgccagtagtcgggggacagggacccttggggttaatttggaagtagctagaaaaggttccgaggttactagtgggttaagactgttgctctagaaagacagaatttttttaacggggtgggagtgttgtgtttgggtccaagagaagatggatttccaaggtgaggggtgggggaggacttgggcttgggtggttgggaggtgaggtggaaggagaaaatgaatggcagtcaggggggcctaggtttgggggtggatgtgggtagcaccctgccagtctccagggacaggccaggacaaagacggctcagtgtggatggggagtgggctgcagggcccggaggaagcttttctaccgtcctccttcctcaggaagaacgcggctgggtggaagacaccggggcagtgggagcaggtgggcggagctgttcgggcccctattgcgcactgaagcctcatgaaatggggatgggagatcaaagtttggggtgcctcgaatgagccagctttttcaagcctagaagcctcactctgtcgctgcccttttcaggccaagagcactgccttttcccagcaggagcgccggttttctcatgatccccagccccacgcaccatgctgcacctcgtcacttgtgccaaatgacagtgcagtacagtgtggcgtcagtgacaatcagatgcctattcccgtgccctcggggtgggggctgcagagcttgatcagagagtgcctctggggagaccccttgatcggcctgagggccacttgttccattcagggccctcgctgagcgtgtctgttaattcacagggctttgagagaaaaccagcagactagttctttcctactccctgccacccacaacacccacagccccaccaggctgagcctgggaaccgtgtgcagccatcctccctggcaaggctggggagaacaggcagccgctgctgtgtatcagatctcatacttgctgacacagacctgatggctcctcttgccgctaccccattttcccccagcagaacctggctaaaaggggccctgaagcactagcaggccccctacctccagaataggacccaagctttggccacaactagtttctctttctgtttgtaatcagcaaggtagaggtgggacaagtcactggtaactggccttggactttggcctgagctctgtggctcctccttggcccgggtgaggggccctggccttggtttctgatctcatctaacactgctctctggcattggctgggggctggggcaaggcagagaaatcacaccctcttccctcccccacctcatggttttttttcttgtccagccccttgctggagcctaagatgagggataaggaagcaggagaccagctgagttattttggaaacagtttttgttgaaagtttagtcttcaggtctagaaagggaagaaaccttgagcaaggatcaatgatatcttcttaggcggtcggttttctgggcggcaaccttgcttgagatctgtacctttccttgaccaagcagggaagtgggtctccaacatgggagggagagcatctgacaggccctccatgcagagccacgcctatttgcagcaaccctgtgacagaactgaacatggcagtgcctcatctgcatcttccagtcttttggtggagactggcaaacggtggccttcagagccgctcggggcagtctgcagcctgtcacagcctcctcgcccccacccccagccccttacagtgctgcccaaaggtccggggagctggacttcttgcagggcggaacagtgggctgggaaggccctgacctggctcgctttttccattctaggccaggggaaagaatgaaaagcagatgggatggcagccacctccccacactgctgccctcctctctgttctttccctgaccctccctgggcattgcctggtctcggtaaccagaagcccatcctcccttctcactttccctaagcctcttcctcaggtgtcaggacctaagggatggctccaggcttttttgtccatggtgggaggtggggggcaggtggatcaagaggctcatgggcctggggctaccaggttggcatttagaagcccaaccaccctgtcttttttgaaggcaatgcagaagaatcttcatttggcctccccacctcccctttacactttggacttttccagaatgtgcatgtgtgccgttttctcccttcctctttccccctccctaagccctctcccctctgtgatcatcattttgattacccctcccattctgcctatttggggcttgcaagttcttcttccgttaggttttttttttttttttctaacttttttagatcagtgattgttaatatttgggacggggatgggggtaggggaggcaggcagtggtttgttcctagcttctggaacctctccgtagaatactgcaaattcacataatagtctgcttctatttctgaggctctcagactcgagactagaacatgctatagacttggagcccctttccctgattgtgaaaggaaggggaacagacccaccatggtcccgggatggtggtgccttcttcacagcatcaacaaaaaccagggaaaatgtgtcttttggctgctaaagctaaatgttgggattcagcctccccaaccccccagccccgctcctgccccataggatcactatgcctggctgatgcccagcacaccagtgcaggagaagccagtccccgcatctcctccccacccccaaaccccgcatgcagcaagggctgcctgccacccactggccagtccccagagtgcccaagctggaaagggttaaaaactgcagtgcaagccagcttcagtcctctgctgctgcccgctgcagccctctccctgacgtttgtcccttctgcccaaaagaaacaaaacagaatggccctgtgccctcactgtgcgcagggggtggagcgcctgcctccagcctgaccagagttctttaggtgcttgagcaactcgggccgccggttaggagaatttttgccacttgggtggactctgcctgagccaaccgcctccaaataggtgacacagaaactagcagagatagccccagacatcgtccctctgccctacccaaggactggcctgcttcagtttggagccttctagagcttcttgatgaggcctccagggcaatcgttcccttcactcggcctctggggctctcactgatgagatgcaaacctgtgccaggcctcaccagcgctgctggtttggggctggggcaggcttttctcccgcccctgtggctcccacatgctgagttgagattggaagcccgtgggtctgggcagcttcatcgggccgtgcgtccagcaggcctgagtgtccagcccaccctggtacccagctttctgaatcaccagactttatcatcaggcgctggctctgcctcagaccctgactctggcatgctcctccctggcccggcgggaatggcacgtggagctggcctcactggggccgagggtctgggctgagtgaggaagatgcgtccgtgctgtccggcctggtgactgactttccccttcatgcttttacaggctgaccagctgactgaggagcagattgcaggtgagtctgctatccccctcatcttagctcaggaaagcctccacatccccagccaaatcttagccactgaggagtgacatctgatgggtgaacctgtgtatcccttgtgtcacctaacactatgccttgtgcctagaatgctgataaatgtgtgtaagagcacaccagtgccccaatgacacgaagccccatggccctgagacaggcctttaccagacaccaaaggctgtgttcctctcctgggcctgggtcatctaggggcttgatatcagtggctgcaggacgagcccaactctctctcccagcttcagccaggttggcttagaaggtgagctccctgcctccctgtggggcctgcagagctcctgtcccactttaggagccgcccaggagctggctcgtcactcccacctctgcgcttgcctgcgctttgcacttcctttcgcatgtgcctgcgcctgcctgttctgctggcggaagtgcctccccagtgctttgcatgggcagctccttcccgtcccttagctcagatgtcccctcggggaggccttccctgacccccatctcaagtacacagccttcctttactctccttcacatcactttattttcttcataacctttctcgctgtctgaaattattttcttatgtcttcacctgttgtatctcctgttactagatgtgagttccattgagtttgggacttggttttgttggtccctgctatagccttaatgcctgcctagaacgtagtaggtcctccgcaaacttttgctggctaaacaaacatctctctctcagcaagctagaagaaatccctggatcccatctaattcatttttctaacccctccaaaaccccagaagggtcagctacaggaactattgtgtaattacagatccgtgcctgcctacccgcccatactgagctgcccgaggacagagagcaactcttggtttatctccatagccaggggccagcacacagtagaccagagtagcgatccagagaatgggcctctgctccccaccagctacccagcccccagctctgctgtcaggttcaaccggctgtgtaacaagtactaaaggcccagcttctgcggtgggaggcaggaacggacttgccttctctcctttctcccctcaacccgcatcacagagtcacctttgcagcttcaaaattttggccctgggtggctatggagacccctgaggaaagccagaagatggcctggtttagtgatcatgagctcggggtgccccatgacccactcactacctgccctccccaagaacaacaaggcctcagcacagggaggtgccagcctccccaaagagactcttgccatgtccccagggcccagaggctcagggccacagcttcccagctgtgcatgtccctcccaatgcacctgccacccatctcccaactctggccttgtgcaacataaacggtctgcttttcaccctgtccccattagcaaactgtccaccgcctcaccccagcccacaccctctgggaataggctgccggacatctgtttttggagggcttgggggtagaggagcaccaggtgccaaaatgggcccagtgggagggcaagagccatgtgcttttctccctgcccctgatgcggccccagctgtggccttcccactcagcactgctagctcctcatcctcctggcttggcagccgtcccctcgctttccatccccccatcaaccccacgcactgtccgtcagccatgttctgctgccgaccacccccacgctcaccacacgcagtggctcagctcctttggaagctggtagcacccacggcaaggaacagggctgccagtcagaagggagtggatgcctgcatttcctcttcaggccggccagaggcattctgcagcctcccctcctcgtcccagccagccaaccctggctaacacactcagacaaagaatcctttcggctctcattcactccatgactttggttcatttcatcatttcaagggagaagtcaaagccagggaccaaacagaaatgtagaatcatctaaggacagctgtcagaccattttccccactgtcttcactggctggccagaaaaatagcttcacctagcacagtgttgatgttcaataactgttgaatgaaggttggaagggctttgccctgagcactgaggagagagagctggttgcgtgggacttgaagtctgtctcagtttctttaggtgggactgatgcccttggccttcctccagggaaggcatccagcatccagaggtaaggattctcctgtggaccttgtgacctctgactcctcccccttcttcccccagagttcaaggaggccttctccctctttgacaaggatggagatggcactatcaccaccaaggagttggggacagtgatgagatccctgggacagaaccccactgaagcagagctgcaggatatgatcaatgaggtggatgcagatggtgagccccacagagcgcgtgggcagccctgctcctggtcaccccgagtgactgcagggagcctctctcagggtgatggatgagcccgtgtctctcagggcccaggccaagagcattctccatcctttccccaccttccagggaacgggaccattgacttcccggagttcctgaccatgatggccagaaagatgaaggacacagacagtgaggaggagatccgagaggcgttccgtgtctttgacaaggtaagcagccctctccaggggcggctctgagactgacgccagccttcaggcagacaggcggaactggagccacggagctaccacttccaggaggtccgggtcccggtgccagcctcattgccaacctgctctgccacctcaggcagcctccctcactgtgctcactgctgagggatggtgatgacagccacccctctcactgcctctctccccaccgggagaagtgcccagtgaaaggctttatccccaacccccaggatgggaatggctacatcagcgccgcagagctgcgtcacgtaatgacgaacctgggggagaagctgaccgatgaggaggtggatgagatgatcagggaggctgacatcgatggagatggccaggtcaattatgaaggtgagtcaaggccaggcttgatctctggaacaagaagagaatcgcagcttcaggaacaagcccccagatccctcttgttggggagggccgctcgccacttagcctgcccgcctgacctcctctctctctgcttcactccacagagtttgtacagatgatgactgcaaagtgaaggccccccgggcagctggcgatgcccgttctcttgatctctctcttctcgcgcgcgcactctctcttcaacactcccctgcgtaccccggttctagcaaacaccaattgattgactgagaatctgataaagcaacaaaagatttgtcccaagctgcatgattgctctttctccttcttccctgagtctctctccatgcccctcatctcttccttttgccctcgcctcttccatccatgtcttccaaggcctgatgcattcataagttgaagccctccccagatccccttggggagcctctgccctcctccagcccggatggctctcctccattttggtttgtttcctcttgtttgtcatcttattttgggtgctggggtggctgccagccctgtcccgggacctgctgggagggacaagaggccctcccccaggcagaagagcatgccctttgccgttgcatgcaaccagccctgtgattccacgtgcagatcccagcagcctgttggggcaggggtgccaagagaggcattccagaaggactgagggggcgttgaggaattgtggcgttgactggatgtggcccaggagggggtcgagggggccaactcacagaaggggactgacagtgggcaacactcacatcccactggctgctgttctgaaaccatctgattggctttctgaggtttggctgggtggggactgctcatttggccactctgcaaattggacttgcccgcgttcctgaagcgctctcgagctgttctgtaaatacctggtgctaacatcccatgccgctccctcctcacgatgcacccaccgccctgagggcccgtcctaggaatggatgtggggatggtcgctttgtaatgtgctggttctctttttttttctttcccctctatggcccttaagactttcattttgttcagaaccatgctgggctagctaaagggtggggagagggaagatgggccccaccacgctctcaagagaacgcacctgcaataaaacagtcttgtcggccagctgcccaggggacggcagctacagcagcctctgcgtcctggtccgccagcacctcccgcttctccgtggtgacttggcgccgcttcctcacatctgtgctccgtgccctcttccctgcctcttccctcgcccacctgcctgcccccatactcccccagcggagagcatgatccgtgcccttgcttctgactttcgcctctgggacaagtaagtcaatgtgggcagttcagtcgtctgggttttttccccttttctgttcatttcatctggctccccccaccacctccccaccccaccccccaccccctgcttcccctcactgcccaggtcgatcaagtggcttttcctgggacctgcccagctttgagaatctcttctcatccaccctctggcacccagcctctgagggaaggagggatggggcatagtgggagacccagccaagagctgagggtaagggcaggtaggcgtgaggctgtggacattttcggaatgttttggttttgttttttttaaaccgggcaatattgtgttcagttcaagctgtgaagaaaaatatatatcaatgttttccaataaaatacagtgactacctgatttggctcctctcctcctgtctcagtttctggcctgcccccctccaacacacatacacaccaaccccagcactgactcctttggcccagaggtggaagagcctctcctcaaagctggctctgaagctgtgtccagtcagtgcagcccagtggacgcctctgaaccacagttctgatcccagctagatcgcagggtcatcaacggcagggtcctgtcctagagatagtcgcacaaatggactgaaaggcggggactgagaaggctcctctgaggcaggcccatcatgccatgggagcacacagagaaggggtcagcccagtcaggtggcaggactgagctgagacctacctgaaagatgggcagtcccctagccgggtaggggaaggacggaagggcattccagttcggggggacgacatgtatggaagccctgaggcaagagaagcccagacatcaaggaactgaaggaaatccagcgagactgggtgagagccccgagcagcttggagcccagccgggtgaagagaggaaggcaggggcaggccctgcagtgggtgagcctcttgatgctttggggagaggggtggcattcactgctttagtctcacaggcagccaaaacatgccaagtttggatctacagtggtgagaaaggcatggtcctgagctcacagggagggcacgggactcagtgttggtttgaagatctgaaacaaaaagcccaaaacaattgcaaaccacacaaggcagagtacaaaccactatgcggtcacagccaaattacaaaccacagaaagctcaactttctcgtggcaagtggggatgtgaggaagaagccgcctcaacagcgcccagtggcacattcctgtaatcctcctactttgagaggctgaggcaggaggattgcttgatgccaagagtttgagaccagcctgggcaacatagcaagaccctcccattccagtggggctatagtggagggatgggtcagaatcctcaagggctcttctcattctccctcgggggaatggggaatgagaggttaataagcattgtctttaacttctgagcttctcacacaggagctgggcaagggtggagcagagacagaagtcagtggaataaaaagaggtccttccactcatctgcacttggcctcagagggcaggggaagcctggcccaatcccagggccctccttgtggcagagagatcaggcctcggctgggttttcctggtgcatcccagtcaccggagccagcggcgagggtggagacattgggagtggcaggccattttccagggccccagcttctgggcccccttttcctgccacctggttgtggcttggcatttggtggtgcagtaaagacggtagagtatagtggataacttggggtctgagcaaaagcacctgccttagcattccggttccagcacttacctgccttgtggccttgggcagatgccttagagtttctggacctcaatgaccctgtccacaaaatgggggtataatggtacctgcctcctgagctgaggattggatgaggctacaggaaggaggggggtgtgcagtgctcaggaagtgttctgtgagcacctgccgccactggctgggtgcttcctgcttcatgggctgcctttgaagctctgcatccatgagctcatcggagccttaaagcaaccatttgggctggatgccattagttcccattttgctgaccaggaaactgaggcccagagaagtgaagtcactactgcaaggttatgaagtaggaagtgacacagccggaatctgaaccagatctaaccctgaggagtccaagcccacagcagctgggctttagggtaaatggtagtttaaaaacagacagacttcaggcaggccagagccagagccagtggggaggccaggctgaggctggcgtcccagtggtggggtctgaaatgggagctgcccccttagcagtaagggtacctgagaaaaattctggtctagtagttgagtcaaagatgggctgtggtttcccacaggattgggctcaaatcccaggttgagactcactcacaagagtgagtcttcgtgctcactaagtcccaaggggccacctctgccacttcaataaacttggagcagcgatttaacttcccttggcctccatttacaagtctgcaaaatggcaaaggataataatctgtaaaggaagacgatacaaatatccaccaacttgggttgtgccaaactttttttttttttttttttttttttttttttttgagatggagtctcactcttgtctcccaggctggagtgcaatggcatgatctcggttcactgcaacctctgcctcccaggttcaagtgattctcctgcctcagcctcccgagtagctgggattacagggtcatgccaccatgcccggctaatttttgtattttggtagaaacggggtttcaccatgttagccaggctggtctctaattcctgacctcaaatgacctccgcctgcctcaacctcccaaagtgctgggatgccaaactctctctcttttcgcctccccctacccccccatgcccccccttcccccccagcctaggctggaatgcagtggcgccatctcggctcactgcaacttccgcctcccaggttcaagcaattctcctgcctcagcctcctgaatagctgggatcacaggcgccacgccccactaatttcttttgtattttagtagagacggggtttcaccgtgttgcccaggctggtctcaaactcctgagctcaggcagtccgcccgcctcggcctcccaaagtactaggattacaggcgtgagccaccgcgcccggccgtgccaaactttatagacatcatttcacttagttcatacccaggctggatggactgattaaaacgcagcacccgctcaaggtgtgcggaccctgcccaggcttgccggcaggagtcactagagaaatctggcagtagaggagtggaggccgggcaggtgaagcctcttgcaccacacttactggaagcagctgagcggggtctcaaagcccagcgcactcggatcccaacgcccacgccttctcccaccgcatcccggtacccatgcttctcagcggcctataagtagtttcccccttgggccctatgttttgaaagacttttactgccagacaggctacattattaaataatcatgacttcccttcccattttttattaatcaaagacaaatagaccgcactcagcttctaatggcccctgggcaagcgctgaggggagccggctccagcccaaagaagagaaatgcctagaccgggagtcatttccagttcagcctcgcaggtctaccagaccagctcaaaacctgtcctgagaaagtgactagagaaggggacttaccagggatgcccaaccagggccgcctgggatcctcgggctcccaaggatcccctcacttcccagagggtggctctggggccactcctgagtgtcactcccagtgtgaccagcaggtggggcaatgaccacggaagaccctgaagagctgcaactcccaggcccagcccacggcataaatctgtgtgcgccggtgtttaagtcccatttgtgggtcaggccgggtgctagggagatgggaatgaataaaaagaaagaaatcgtaaaatgaatcaagtccccttgagtcccccgttcccagcacatcacttcctgagccccaccccagactagggcaggcgcctagagcagtcagcctctgtgtctgctggtttgagccaactgcagatcaaaaatattcaaaacacacagggtgcggtggctcaagcctataatcccagcactttgggaggctgaggtaggtggatcacctgaggtcaggagtttgagaccagcctggccaacatgatgaaaccccatctctactaaaaatacaaaaattagccaggtaagctgggagcggtggctcacgcttctaatcccagcactttgggagaccaaggcaggtagattatttgaggtcaggagttcgagaccagcctggccaacataatgaaaccccgttcctactaaaaatacaaaaattagccaggcggtagtggtgcgcacctgtagtcccagctactcaggaggctgaggcaggagaattgtttgaacccagggggcagaggttggagcgagctgagatagagccactgcactccagtctgggcaacagtgagaccctgtctgccccacccccccaaaaaaaattagccaggtgtggtggtgggctcctataatctcagctagtcgagaggctgaggcccaagaattgcttgaacccgggaggtggaggttgcagtgagccgagattgtgccactgcacacttgggtgacatagcgagactccgtctcaaaaaacaaaacaaaaaaaacacaataaaatatacaacttttaaaacaatacagtataattatttacatagcatttgcattgaattaggtgttataggtaatctagagatgagttaaggtataaaggaggacgtatgtaggttatatacaaatatgacaccgttgtatataaggaacttgagcatccacagattttggtatcccaggagggtcctgaaaccaatccccctaggataccgagggatgactgtctatattttcacagatccttgtactgtgccctcttagtacggcttgtgattttgtatctgagctgcttattataaaacatttctttttgagacggagtctcactctgtcacccaggctggagtgcagtagtgtgatcttggctcactgcaagctccacctccccggttcacgccattctcctgcctcagcctcccaagtagctgggactacgggtgcccaccaccacgcccggctaatttttttgtatttttagtagagacggggtttcactgtgttagccaggatggtctcgatctcctgacctcatgatccacccgcctcagcctcccaaagtgctgggattacaggagtgagcccccacgcccagccaaaacatttttttttagacagagtctcgctctgtcgcccaggctggagtgcagtggtgtgatctcggctcactgcagcatcaacctcccggacccaagcaatcctcccaactccacctcccaagtcgctgggaatataggcacagaccaccacgcccagctaatttttgtattttctgtagcgaagaggtttcaccatatcacccaagctgctcttgaactcctgggctcaagcgatccacctgcctcggcctcccaaaatgctgggattacaggtgtgagccactgcgcacgacctttgtaacacatttttatgtgattattcaatcacccacgtggattgtgaacgaggtagggccaaggctatgtcagtcaccactatattcccagtgggcacgaggcagcctcgggtccagaccagagcaactcaaggtaatgtatgttgagttaatgaatatacaggaggcttagaagggaggcatcagatgccccaagttggaggtgtaagcacgacagaaatgcttttttttttttttttttttttttttagacaaagtctcactctgtcgcccaggctggagtgcagtggcgtgatctcggctcactgcaacctctgcctcctgggttcaagtgattctcctgcctcagcctcccaagcatctgggaatgcaggtgcccgccaccacacccagctaatttttgtatttttagtagagatgggatttcaccatattggccaggttggtctcaaactcctgaccttgtgatctgcctgcatcagcctcccaaagtgctgggattacaggcatgagccaccgcacctggccagaaacccttctcttaacttgtttcactttctgctaaacctcaggtccccgctcagccatcccctcctttcagaagccctcctgcctagacacccttccaccctgcttcatgaccattctgaggacagggctgtctcccccaccaaactgagctacgggagggcagggccaggtctatctctatcactgccatgtcaccagcatcacagggacaagccctgacatacagtagtccctcaacaagaccctgcggagcgggtgagcagacacacgtccttgccatggcaggctgtggccagtgccatcgtgcagccgaaaaagttctgagggcccgctgagggaggagtggttgcatcttcaaggaggaaaaatgtaagaaagaatttgaagggcaagggtgtttttgacggatggaaaagggaaaaaacagttccaggaagagtgagctcaataagcaaagatgcgggggcccaaaatgtcacggcctctttgaggaaaccgcagccatctgttgcggcctcagccaaggcctgcaggggggtgggagcgcgggagctggccaggagcctccaggtggcgcctgagccctgggagctttccaaggctggcagggactgccagatagagctctctggacaggacccgggcagctggcagagaggatgaacttggacagtcaggggccaggatcccatctaggaggagtttccaaatcacccccgaggggcaaagggtggatggggggcattgtctgaaaacctctggcctgttagacagtgtagacacccaggtcagaggtggggtgaggggaggggtctgcagcaaacagtgagatgtcaggccctgggggagtaagagcccacagaaccccagcttctacgttgcatcctcacttccccttaatcctcatctgaaaaatgggaatgagagcagcacccaccgcaggcaaggatgctgtggtccaacgctcagctctgcctggtacacagtgagccctcagaggccagatgggcagaactgacccaccttcgggggtgacacagagagaggaggtgagcacccttcaatgcccttctccagaaccccccatcccttcctcaccatcctctgttgggggtaggagggttggccaaggtttggccaggcgtggtgacaaagtcaggtcccaatctgatgtttgtcaacctgttgtgcttttgcttttaacaagggctttttttttttttttctttgaggcagagtctggctctgtcacccagactggagtaaacatctcggctcactgcaacctccgcctcccaggttcaagcaattctcgtgcctcagcctcctgagtagctgggactacatgtgtgcgctaccacacctggctaatttttgtaattttttttttttttttttgagacggagtctggctctgtcgcccaggctggagcgctgtggcgtgatctcggctcactgcaagctctgcctcccgggttcacaccattctcctgcctcagcctcccgagtagctgggactacaggcgcccgccaccacgcccggctaattttttgtatttttagtagagatagggtttcactgtgttaaccaggatggtctctatctcctgacctggtgatccgcccgcctcggcctcccaaagtgctgggattacaggcgtgagccactgcgcccggcctaatttttgtatttttagtagagatggggtttcaccatgttggccaggctggtctcaaactcctgacctcaggtgatcctcctgccttggcctcccaaagtgttgggattacaggtgttagccaccatgacaggccagcacccagctaatttttttattattatttgtagaaacaggttcttgatatgttgcccaggctggtcttgaactcctgggctcaggggatcctcccgcctcagcctcccaaaatgcagggattacagatgggaatcacctcgccctgcctacttactttattttttaaatttttttttaatcgcagtaagatacacataacataaaagttgctattttaaccattcaaagttacaattcagtggcattcagtgcattcacactgttgagcaaccctcactactatccaattccagaacattttcatcaccccaaaggggaaccccaagctcattcatgggtgaccttgacctgtttttaactctcccagacaccccttgttctgctttattgtgatttgaaacgtggttacctgggcagggtgggggaagtcaaaacacccgaaccagagccaggaggtggtttccttttaaattgtatctgtccaaataacaatagcaacagctgcagcaatggcaatcatagtgacatttcttatgggctttattccaagccctgagctaatttgcttttcagagggaattgcttaatccccaaagccgccatgcaagctaagtgctagattatgatcaaaaggaaaccaaggtgtcccggagtggatagacgggcctgctccaagcccacgcccactcgctgtgtgagtcgggacaggtggattatcatctctggacctggactccgtcttctgtagaaaggacttattgctgggctcagaggctcccacctgtaatccaagcattttgggaggctgaggtgggaggatcacttgaggtcaggagttcgagaccagcctggccaacgtgacgaaaccccgtctctactacaaatacaaaaaaattagccagaggtggtggtgcacgcctgtaatcccagctactcgggaggctgaggcaggggaatcacttgaacccgggaggcggagtttgcagtgagccaagatggtgccattgcactccagcctgggtgacagagtgatattctgtctcaaaaaagaaagaaagaaagaaagaaagaaagaaagaaagaaagaaagaaagaaagagagagagagagagagagagagagagagagagagaaagaaagaaaagaaagaaaggaaagaaagaaagaaagaaagaaagaaagaaagaaagaaagaaagaaagaaaagaaagaaagaaagaaagaggatttataataggttgccctgtggatggagtgggaggaagcgctgcctacccctcgaagagttggctgctgttgtcctcatgggaggctcaggcctcacgtaccgcgcctctccccaagtgtggattttttgttttaacagagggggagagtaggaaaggggaactgggactggcagtgcagtggggctgggtggggggagttcccactcaccctcccccaccctaaacgcctactcacttccttccatgctcatcagctcactcctgagcaccctccatcctgggcctctctgagggcagggagtggtcatgagaagcctgtgtggatggcaggctggaaatcaccccggcagggcccagggtggagcaggggcttgtctgtgtccttaacaccaggcaatcagcactgctgaatttcagtggaaggttgagggtttttttgggttttgtttttgagacagtgtcactccgtcacccagtggcacgatctcagctcactgcagcctcaacctcccacgttcaggtgatcctcttgtctcagccttcctaggagctgggactacaggtgtgcaccaccacgcccagctaatttttaaaatttttttgtagagacaagttctcgatatattgcccgagctggtctcaaactcctgggctcaagggatcctcccacctgaacctcccaaagtgctgggattacaggcatgtgctatggtgcccagccaagtatctgttgaatgaatgaatgaatgaaatcttggtgagggctctaaggacacataacatgaggtcaggctctgcaaggaggcttttatttattcaggaccctggggacaggcacaggacttaggtttgtgttctggggcagtccctgggatccgcagcccccacccttcatctgccagcttctccatctgtctccccaccacctgcacccccccagttctcatcttgcagccagtcaagctaggtggaatgtctcaggccctttttgtaccaagcacatgtcctacgtcatcacccacaatgcagcagcctccccttcctcccgttgcccctttgggatgccagggctcccaagcctggtgggggaccagcggcaagggaaggcagggagcttttccaataactgtggtttttgtggagcagaaaggggctggctcttggagtggcttggtagagggggagggccatcccctggggacttggggtgggcagttgggcctcctaagtggacgcagattggagccagcacccagaccagagcagacctgactgtacagaagcctctgggaacttctccgccttctaaatatttagacaatgagatggatggggaatccagggccagagcaggtcggccaggccactggttattttgagagaaccattctttctgcactccaggataaacgtttcctctgtccctcactctcttcccagagccagcagcgactgccctgccgcaggagaaacagcagctgatcggccccagagtttgggggccaaggttccagcatccgcagccatcagccatgtccctgattttctggctcctgtcgcccgaagacagggcagagatcacagggtcagcttgaaatgtcagcagagggagcaggcgacgctggcttctgctttggacgacgttcccacggcgctgccgctggactgctgtgtgggaggcaagggctccacctgcccctcgccccaagccgacaaaggcacgcagctcccctcctttcccacaggagcagagggggcccttgggtccctcctccctgaggcgagctgggaaaggggtgtctgcgagtctccgtgggcaggcccgaggcacaggcagcagacccagagcttgagtcgctggaagacagccttgcggaaaaggatgaagacccaggggtccaggatggggttgaaggcgtagaagcggaaggcaaggaggtcccccatctcactgctgctgtcaggggcgacagcctgggtgaagcagcggatctgagggcagggtgagggcgtcaaggagcacccaggagtcctcagcctccccaccctggctccctcctcccacttgcttaccagggatgaggtaggggtgacatgtcagaggggaaggagataagataaagactaagtaacaaatgtatctggggaacacagggagagaaagccccaggaaattgccagagatgcctaaggggagagggatgggggccaggtatgtgggtccccccacccttggaagctgggaggaccctcgggctccacagatttttgagtataacgtccctgcaagaaggtggcgccacccggctgggccccctgaaactgccgcagagctgcggtggtgcctgtgtgtatctgtccacggcatctgagtctctgagtcagagtaacccccaaaaaagatttaaggaccccccaatccggcctggcctcttgcattttacagaaacagaaactgaagctcagaagaaaggtggcacgaccaggtgtcacagacactgagtgggtaccagggtctgtgccactcccattggggaggggcaggacggggtccccgcaggaaaccgaggtgcagaggcaagggtggggcctgctctgaggcagaggggagccaggtaggtgggagatcaggctctacaatggaaggacccaggaccaggacctggctctgtgtgactgggcgaaagacactgcccctcatctgtaaaaacggggatgggagagaacgttctcttggtttcctgccaaatactgtggaatgggtggctatgatcattttgaaaattatcttaggaagtatctgtaagccactaagcacggggcgggcatagagaagtgctcaatgagtggtggtcttgtcattacaggggtggggaaggatgggggatgcatttcatcatggggggctcaggatgcctaagctgggagacaaggtatcagaagaagtcagatgcagaaagacccctccagaaagccaggagctgtctgactgaggaccaagcctctgtctgatttgtttttgttttctttgtttttgttttgagacaaggtcttgctctgtcagctaggctgggatgcagtggtataatcacagctcactgcagcctcaacctcccaggccggagcaatcctcccacctcagcctcacaagtagctgagaccacaggcacaggccatcatgccaggctaatttttaaatgtttcatagagatggggtttcaccatgttgcccaggctggtctcaaacctctgggctcaagtgatcgtcctgcctcgcctttctttttcttttttttcttatttttttttttttttttttgggacggggtctcactctgtcacccaggctatagtgcagtggcacgatctcagctcactgcaacctccgcctccggggttcaagcgattctcctggctcagcctcccaagtagctgggacttcaggcatgtgccactacgtccggctactttttatttatttatttgttgtatttttagtagagacagggtttcatcatgttggccagactggtctcgaactcctgacctcaaatgatccgccggcctcggcctcccaaagtgctgggattacaggtgtgagccaccgcatccggtcctgcctcggcctttctacatgctgggattacaggcgtgagccaccatgcccacgatgtctcacctcttttgagcctcagtctccccatctgtgacatgggcacaacccacagagctgccctcctcctctccccactcctcccagctccggaggggactcaccgtgagaggcagggagcacacggccatgaccactgtcatgagggccagcaggatcaggtggtccacctcgtcctctccggtgcgcggccgtggacccagagagccctggtggcgcttctgctggcggtacatgcggcagaggctgagggtgaccgagccgttgcagaggaagatggcagccaccagcagggccaccaggccggcgtaggccagcgagaaggcggcgccgcccggctgggcccagcgcatgcggaggaagcaccagctgccggggcagtactgctggtgttggcccaggcccagcaggggcagcgcgcagaagaggacgcagaaggcgtagatggctggcagcgccaggcgggcgcagcggggcccgtccagctgcgcgtagaggtaggggtggctcagcgccaggcagcgctccacggccatggcaaagaggatgagcatggacgccaggccgaagaaggtcatggcgaaggcgaaggcatcgcacagggcggggccgcctcgggccaggcccagcagggagctgttgcgcgcataggccacgaacacggccgggctcaggaagctggtgcccagcaggtcggtggccgccagtccggtcaccagcaccgcgaaggccgaggggcgcgccggtcgccgtgcgctcaggatgcccagggccagcccgttgcccaccacaccggccacgaacatcagggtgctggtggccggccccaccgagccccgcacgtaggtgaggttcctgcacgaatccgccatcccaggtctgggctggagggttcccaaggtggggggtcagagggagccagggctacccccaccacccagcccactcagatgtccctgctggccagtccttttggcagctggggcctcccagccaacccccagttctcctgtgtgtgcgggtatgcagtcctctcccctctggcttctccagtatctctctctgtctctccccaccttcctgtttctctttctctctttcttttctttcgtttcttttgagacagagtctcactctgttgtccaggatggagagcaatggcatgatctcggctcactgcaacctccacctcctgggttcaagcgattctcctgccccagcctctggagtagatgagattacaggcgtccactaccacgcccagctaatttttgtattttcagtagagacggggttccaccatgttggtcaggctggtctcgaactcctgacctcaggtgatccatccaccttggcttcccaaagtgctgagattacaggtgtgagccaccatgcctgacacccaccacccccccaccacctcctgtttctttccttctctagctctgtttctgccattaaagagacagagaacatccgggcattgccagttctttccctccctgtctctcggtctcttgctgatatctccctgtctctgtcccctcccttgtccttgtcctccccgtacctttctccctctaaccccacaccctctacctgctcctgctctgtgttgctgcatccccagcccctcaccgcacctctccagtcttgcccaggctctcctgtcccgtgcgtctgtgccttcacttgctttgctcctcgtgtctctcgctgcctgtgtcggtctgtgtgtcagcttctccttccctcctccctccgtccctccctccttcccaccctcctcagcttgcctgctcaccccagctttttcatttcctctctctgccccgccctccctcactgttctccagagggccccctggcacactccccactccccgtccacccgcccaatccaggacatccatctcccatcgctgcctccactctcctccccacatcctctcttggttcccatcactgagccacctgccacctccccacacacaggtctcctccctcccccagtgtctccctctctggcctgggtggggaattcctgagtcaccatcacttaggcttggagcctcccggggtagtagggggcctctaggagggacctgaagagcacagttgaccaggcttcagtggggtggtcttggcctgggctgtctcagggtggcctctgggatctattctgggctccaggccccggggctgaggacattgcccagggattgagaaatgaccaggaaattcctctctgatgtagtgttttccagacaccactgagagttctggtccctggacacaattcactccttccagaaagctgaggaaggaggcttggccagagagagacatgccagtccctcgagcctgtccctgggcacccagctcaccctgcagagacccgagaagaaagcatgaaggggtgtatttggtgtccagttgtcagggacaggcttgggagacttccatggcccatgatggaaaggtagcactgggccaccgtccgacttctcgcacagcacccctaggccccaggccaagctctggtgaccttgaccttcaggaatcatattttgatcacaggaagctgtccacagctccaacattgctgccatgtgtcccccaccctccccaaacacagccaagccaccaccgctgcagcctcgggccagtgtgacagacccacatgttcccgctacccgcacagcgttcacgggtctcccttcccacggagtcggtggcttcccaggcagcctcccagcccaaaagggccagataaaacctcagagaccctctctgagccccgctgtttctcagggggacggtctcagatccattcgacttggcttcctgtttccatctgaccaccttttttcttgctgcgagatggtcccaggtgaggagagggagctggtagacttcagcctccttctctgtgcgtggggtaacacgggcctcagggacctggtggccagcctcggcctgcagcacatcccagattggtctttgtaacaaggagagaggctgtgcgggtgtctcttgtccaaggccaggagggatgtgtccaacccaaggactggactgtgggcagctgccgtcttgccctctgtaccccggtgtgtgaccacaacccctttgcccctcccccccatctccctatcacccttgcccagctggcacccgcagcttccagcaggatggacgcccaagttccagccccaccgtggctccctaagggaccccccagccctgctctgggggtgcctgtacatgtgggctccaggtcctgccacgttgtcccgcctcatgccgtgaggtccccagacagaccagagggaactcaggaagttatatcatattaatgaaggatgatgcctggcaggcgtgcatcttgtttcggcatcgggggggcctctggttcccggagactccctctctcgcttcctgttacaaggacggttaacattcaggaagtcccctctgctcccatgcccagtgggaccacagtcaaacccttgtcccttccaggcctcagtttcttttttgttgttgtttttctttttgcttgtttgtttttgttttgagatggaatcttgctctgtcacccaggctggagtacactggcatgatctcagctcactgcaacctccgcctcccgggttcaagcgactctcgtgcctcagcctcccgagtagctgggattacaggcatgtgccactgcgcccaatttttatatttttagtagaggtggggtttcaccatgttggccaggctggtcttgaacgcctgacctcaggtgatccgcccgcctcggcctcccatagtgctgggattacaggcgtgaaccaccttgcctggctgttcgtttgtttttgagacagggtcttgctctgtcacccaggctggagtgtagtgctgcaatctcggttcactgcaacctctacctctggggttcaagcgatcctcccacctcagcctcctgagtagctgggactacaggcacccactgccacgctagctaatttttgtatttttgtaaagacagggtttcactgtgtcacccaggctggtctcaaactcctggactcaagtgatctgcctacctcggcttcccaaagtgctgggattataggccaccacgcctggcctcaggcctcagtttccccgccgatgccactaggagtcatgagccctcgcaaccccaggatcggttctgtgttcctgcatcaggagcaggtaggggtggcagtgactgtgactccctcctaatgaggggactgagttccccagagtccgtactggcgccagacatgcctcagtcaccttgccctgaaacccagcctcctgcttggccgtggccccagctagccgggccaagcccacagcagggtccacacgggggttccactccccagccaggtgccttggggtgagaaatcacccacggtgcgttgtgccaggggcagcttccagggtgggcggagctatggaaggaactgccctgggggcgtgggtccgtagcctccatctcacactctctccacccatggcgaggaacaggaccaggcctccctgagggggaccctgaagcagcagggaaaaagaggaaggacagctcagagaccactgagattagggacgcacacacagcacccgggaggggagagagattgaggctagtgtgctggggactgtgggtgtgtaaccggattgtgactctctgtagagttagtgcggcccatgtgacctaagtgagcatttttctcagcattgattgtgtttgcgtgtgtattgtgtgtatatgtgtattgtgagctcgtgggactctgtgtgcacatgggcacacagctatgttgtagttttgttttgtttttgagatggagtcttgctcttttgcccaggctggagtgcagtggtgccatctcggctcaccacaacctccacctcccaggttcaagtgattctcctgcctcagcctcccgagtagctgggattacaggcacctgccaccacgcccagctaatttttgtattttagtacagatgggatttcactatgttggccaggctggtctcaaactcctgatctcaggtgatccgccggcctcagcctcccaaagttctgggattacaggtgtgagccaccgtgcgcaacctagtttttttgagacagggtttcactctgtcacccaggctggagtgcagtggcacgatctcagctcactgcaacctctacctcccaggcttaagcaatcttcccacctcagcctcccagatagctgggaccacaagtgctcaccaccatgcccagctaatacttttattgttttgtagagataggatcccactatgttgtccaggctggtctcaaattcatgggctcaagtgatcctcccaccttggcctcccaacgcactgggattactggcatgaaccatggcacctggccgagaatggtttttggtttttttgtttgtttgtttgtttgtttgtttgagatggagtctcactctgttgcccaggctggagtgcagtggtgccatctccgctcactgtaacctctgcctcccaggttcaagcgattctcctgcctcagtctcccaagttgctgggactacaggtgcgagccaccatgctcagctaatttttgtatttttagtagagatgggatttcgccatgttggccaagctggtcttgaactcctgacctcaagtgatctgcctgccttggcctcccaaagtgctgagattacaggcgtgagccaccgcgcctggctgaggatgggttttgaagttcatctccaccactcaccagtcagtcaccatgtgacctgagaaaatgacttcccctagcaaagctttgatgttcttcgtcaaatggctgccttgaccttgttggggtgttatgtgaagataagagacagttccccctgcctgcctcccaggaagccctcaaatagctgttgatattattcattcaacaaaccgtaaccagcagtttactgtgtgctaagagctggggacacagaggggctcagagggcacagcccaggaagagtgttctcaaacaggtttgtccacccagtgtggggatcctgagcaggggtgcctgcatctgtttttttttgttgttgttgttctgagatggaatctcgctctgtcgcccaggctggagtgcagtggcgagatctcagctcactgcaacctccacctcccgagctcaagcgatgctcctgcctcagcctcctgagtagctgggacttcaggtgcccgccaccatgcctgactaatttttgtatttttagtagaggcgggatttcgccatgttggccaggctggtctcgaactcatgacctcaagtgatccgcccaacttggcctcacaaagtgctgggattacaggcttgacccatcacgcccagcccaggcctgcatctggaagtgccgcagacctaagatcctggcttgccctgggcctgaccctctccggactccctggtttccgtcctcctggctctggccctgggaggaagtgggccttatctcatgttctgcacacacgcaccaccagctgctcgtgcctgccaggcctcccgtctgcctgctgtgccctctcactgctttgagaaactgctatgtgtgtcccagacctgtctcgccttggctggttccagcatccagagccagaggcctcctttctctatccactcactgccctccaccgcaaatgggccctggcctaccttctggtggctgcacctcaccttgctccagggggcataacccagtctcctgcctaccctgcctctgaatgggccgtgcccctcacctggggatcccctcatttcctagccttcaaggcctcttggtcaccccctgagcctctcctgagcggtcgtccatcagatcctcccactcccattccagtctcaaaccccagctggttacctctccatgcctgtttctctctctctctctctcttttttttttttttttttttttttttgagatggagtcttgctctgtcctcaggctggagtgcactggtgcgatctcggctcactgcaacctctgcctcctgggttcaagcgattctcgtgcctcagcctcccgagtagctgggattacaggtacacgccaccatgctcagctaatttttgtatttttagtagagacggggtttcaccatgttggccaggctgtcttgaactcctgacctcaaatgatccgcctgccttggccttccaaagtgctgggattacaggcatgagctactgcgcccggccccatgcctgttttccttgtctgtaaaatggggataaacagagtcaccttgagggctatcgtgagcattgagcaagatgggactgttgaactgttcccctaggaagcgatggccaagattgcagctcctgctggctctaggctttccctcccccgctgtactccttcggccaagccaagcgctgctctgagcgcctgggttggggtgcagcgtgcgatgtgggtgcagagggaagacagcctgaaacagggcagctgagagcccttggggtctggaggaacaagcacctcgccctgcatgcacctctacctcttggcctgtctctgacccccagcatgggcctggccccagagctgacttcacccctgggggtggcaggaagcagcagctggtgaccagaagctggtgctgctacaaggcagtaaatttaataagattattcggatctgttctcatggaggctgggcacgcagggacctgccctgtccctcctggattgtgacttctgacttctcctttcccgtagcctcagttccccatcctccccctccagaaagacacctccttctggtcccctctgtgtcccactcccaccagccctcccttcccccaacccaggtcccattcagctgcttacatctccatagtttctgtcccccaggaccaggaatgtgaaggaggaagggtttgcactacgcagctctgagattccagggctcgaaggatctagctcccaagagcctaggctcaggaactccttacacttcttctgagatgctgaactctggaatcctagggtgcaggaccccaggatcttggccccataggattgaaagatgctggaattccagccctcagaggtcctgggatcctagattcctttgcatttcaggttctgagctgtaaggatgcaggatctgtgaattctggaatccttctagctccttcctgcccagcttctctccccgctcctcctccacaccctagctcatctctggctcactccctgtcccccgtctcccccggggctcccacagacatgatgcaaccaggccggagccaagccagctcagaggtgggaagcaggagggagatgtaattacagacgctcctgcctggatcctacaggaaactcagagtaggggcccgggggaccctaatccaatgtgaataatggagcagacttgtgcacattccccctgtggaggggaggcccagcaagccacctccagccagacccagggtccagcctccaccagccccaagctggggagcctgagtattagacaagataagaagagatgagggagaggagagggggtgatcctccagcccttgggccaaccaggtaaaataattggccaaacctacagcttccctggcctgcattctccccattttcaatggagacacagaacatttcatttttcttttcttttctttgcttttttttcttttgaaatagagtctcactctattgcccaggctggagtgcagtggcgtggtcttgtctcactgcaacctccacctcccaggttcaagcgattctcctacctcagcctcctgagtagctgggattacacgttcatgccaccatgcccagctaatttttgtcttcttagtagaggcggggtttcaccatgttggccaggctaatcttgaactcctgacctcaagtgatttgcccacctcggcttctcaaagtgctggatttataggcgtgacccaccacgcccagccattttatttctcattcctccataagaagcccccgacacaggcttcaggttaaatggcaactggtccccagcttccttgaccagaagacaatagggcatggtggggactttggtgagctggaaagcccaggcaccgtctcacagcctatgcgtcaccagaccttacaatttcaaagaagactttgcaattccagaggaatatggactttgatgtgaaatatctgtgtttttcaattggcagccaagtcaagaacatctttaaacatcatgtaaagccataaaaatataactgcggccaggcgggtgggtcacgcttgtaatcccagcacttgggaggccgaggcaggcggatcacttgaggtcaggagttcaagaccagcctggccaacatggtgaaaccccacctctactaaaaatacaaaaattagctgggcgtgatggtgcatgcctgtaatcccagctacttggggggctgaggcaggagaattccttgaacctgggaggcggaggttgcagtgagccaagatcctgccgctgcactccagcctgggtgacagagcgagattccgtctctctctctctctctttctctctctctctctctatagatagatagatagatagatagatagatagatagatagatagatagatctgcaagctacgtatgtcctgcaggccagcagtatgtgaattggaaaacagagggcaggaaccagagctgtcacagtcatccctttgtctccagaaaaatgacaaaatagaagaagaatgaaggaatgtactcattattttctttcctctccctccctctagccatgtttctctcttctgggtccccaaattttattaccaccatgttccagctcagatgtcacctcctccaggaagccctcccttacctccaagctgagtcaggagttatctctgcgctcccccacccagcactgcgcactctgggtttttaccatctggggacaggtctttctctcctactggactctgagccccaagagggcagggcagggcagagccaaggctgtcttggtcacagccatgtccctagcattgcccagcgctggtcagagagtaggtactcagggagtgtttggaagaatgaatgagtgaatgaacaagtgagcagggaaaaagtgcagggctttaggacagaagtgggcctgcggtagaggggaaccaggtgtgaaaacaggagtcgttaagggggtgagaagtgtgggatggggactggggaccctaagaatgtccaagccagtggggaggagaggagagaggatggcggaggggttcagggagcactggagtacccccgtcagcgctctgttaccgcctagctttgtgactctgaataaaggacttcctttggctcagtttcctcttgggtatcatacaagtagttagctgtcttctggggctgtcgggaccattaagttcaggatcgaccgtggaggagagagcaccgaatactcatctcctccgaagctttggtggagtcgtactccctccacgtccacccctacccccaacacacacactcagaaggaatgagaacggacacagcttcccctacggtggccccaagctctgtgcgtgcctcagtctccctgaaagcacaggcaccaccacagttaccaagtttattggatccatactttggcaggggagggtaagctgtccggagggctcagagcagaacacaaaagaggcgcttgtcgcggaaggggttctccgcggcgggtactggcgtcaccagcgggtcatctttggcatgcgtctcgcagaaagccaggagttccgctgctgcctgcgacacctgcgagcacccgggtggagatgtcaccgccctgcccggctccttggagccgcccacttaggccccgcctcttgccctgtcccctcctcccaccttgccccgccccatacaggcctttccccttgtcttactccgccccctcgtcctggcccctcccctgtcctaccccgcccctcgtcctggcccctcccctgccccatccctcccctcgtcctggcccctcccctgttctgcccctcccctcgtcctggcccctcctcctgccctgccccgccccttgcccagccctgttcccaggggcatccttgcactatggctccgagccgggccgacacagccccggacagaccgcaggcccagaacccccgccctattccccaccccgacccagcaccttcatgcggtcgatgttcacctccagcttcagctgttccaccgtcttgcgggcctcggcaatcttggccatgttgttggacatggttgcggcggggaaggggttaaaagacgcgcgggagtgggggctgtgggggtaggttaggatacgtctgggtcccgaggtgggggcgagagggcgggccccggtaacaggtgcgagggtggaagggcgcgtgaatggggtggccaggggctggtggagggagggacagatgaaggggacaggaacaagaggagcgatggaggggtgcacggatggaggtagctaaggcaggtggggagagagcagggaggggcgagggagggaaggaggggcgcacagatgggaggctgagacagaaggacagggccacaggtgctggatcagaatccaggtgtcctcacccccgggggcagagcgagagccaggaggggggcccctcccccaggccaattagcagtggctccagggagaactgggaattaagatcgcggcgggaggggcacagagggggcctcattagggccttggcagcagctgccctctccgccaccctcagggagcccccccaccctagccctggtcacctcaaagcctcctctgctcattagcagccagggcagagggctgggggagcccaactcgggcacctgaggagaggcctatcggatggacagagggacaacgggacgcgcagaggcagagacagagtaatggagggagagactgaggcacgggagaaatgaagagacggggaggaatagagagagggagagactgggggaggaatgaagtgatggaggagaaaatagagggacaaatgaaggggggagcaaggaacagggtgatacaaggcgacaggcaccgaggggacaaagggacagaggggacagagcaggggagatggagggagggggtgtggggtgggagaggatggggagatggagggagggggtgtggggtgggagaggatggaggagatggacggatggggtgggagaggatggggagatggagggagggggtgtggggtgggagaggatggggagatggagggagggggtgtggggtgggagaggatggggagatggagggagggggtgtggggtgggagaggatggaggagatggagggagggggtgtggggtgggagaggatggaggagatggacggatggggtgggagaggatggggtgatggagggagggacgaaggagagagaaggggaaatggaggaaggggggagggaggaaggagcagagacaccaaggagataaaggaacagagacggggagatagagggacagaggaaagaagggaaggacaaagagggagatggaggggttggggagagatggaaacagaaagtgggagagaggaacaaggcgagagacaggctgatggagacgcagaagaattcattcactcactcattcactcattcactcattcattcccaggcggagagacggtggccacggagcaggcaaagggaccagctgtggggccgggaccggagcttcctacctgttgctgctctgggccgggctcgcggcggtgacagaggctgggaggcagcgtctgggtccctccggcccgccccgccccctcccctggggcgcagcccctacggacccgcctcctcccggagccaccgtccccgccgccccgccaccttggggctccctctctgggccctctctcttgtctgtcagtcctatctttgtccctctccctgtgtctctgccgctgctgtcctattgtgtgactctctctgtgcctctctcacactcactagaaaacacagtctctctaggtgggccccgggcctcgctacatttaatccacagtcacaacaaacctctccagtgtgtcccacagagccgctcactcagccacactcgccacctcggtgtcaccacccccctccagcctcatgctcactgtccctcacacagacaaaaactatcttgccctgtcacacggtagcaccacacaacctcacgaatgaccttgctcaacacaacctcacacggttgccccaaatgccacacacagccgccaccaatggcagctccaagcgctacacagtcagataaattatctcagagcaccaaatgtaccacagtgtcacacataatgtctccaaatgtcacacacatttgcatgcctttttttttttttttttttgagatgaagtctcgctgtgttgcccaggctggagtgcagtggcccaatctcagctcactgcaacctccgcctcctgggttcaagccattctcctgcctcagcctcctgagtagctgggattacaggtgcctgacaccacgcccgtctgatttttgtatttttcgtagagacagggtctcacaatgttggccaggctggtcttgaactcctgacctcaggtcatccacccgcctcggcctcccaaagtgctgggattacaggcgtgagccaccgcgcctggccttgcatgccatttaaactctctcaatctcacaccctgtcccagtctcacactttctgtgtctcacggtggcatgcaattacccaatacaacctgtcaagtacacactgttttatagtatttcatagtaacacccagtcgcctgtccagtgacaaccatggaaggtcacatacattctctcacagtctcctggtgtcacacgcatctgacacattccctccatacacagtctgtccctgtcacacacacgcacgcaacccatctcctggtgtcatacctagctacccacgatggctcagtgtctcacagagtcccacacaagctcgcagcgtttcacacactcactcccacctctccatcatctcttgccttctacacacaaggcctccctcacgctctcgcttccgagtgccctgcacagccgcaaactctcgcatgcactgtcacaacgctgccatctctcaccagctcagtgtcacacatagtcacgcagttttgttttgttttttgagacaaggtctctctctctgtcacccaggctggagtgcagtggcgcgatcttagctcactgcagcctccacttcccaggctcaagcgatcctccaacctcagcctcccagtagctgggaccacagaggtacataaccgcacctggttaatttcttttatttttattttggtagagacggcgggggtggggggaggggtctccctatgttgcccaggctgatctcaaactcctggcctcaagggatcctcccgcctcagccacccaaagtgctgggattacagcaatgtgcccggatcacgcactttttcacaagccatacacagagtggccaacacagactgacactcactgtgtctgtcccacccaggccccctatgtgcctctcatgacacctgcccacaccacctctcagtgtacatcagtcatcagtctcactctctctcacacagaatctacttgtgtgacacacacagcaccgtatgctcaccatgttgcacacagccacacacactgccccctcacacgcaccgtcacacacggtctctcactcccacatacggtctctcaatgtcccatacagagccccaaagagtgtctctcccacacccgatcacacataacctttcatcagcacacacagtcacccacaatctctcagcatcaccagtaatctcagtgtcacacacagtcagcgacatgtcatctctgacatatgcagtcccactcagtctctccttgtcgcacataatctcatatcaatcagtcacacacagactcccagcaccacacaccatctcaccagtacaccatcatggcagtacacactcatggtgtcctggtcctggcactgcacaccatctcacggcagtcgacactcacacagtttcctggcgtcgtacaccatctcacagcagtacacactcacagatctcctggagtcacacaccatcacggcagtacacactcacacactctccagatgtctcacgccgtctcccggcagtacacactcacacagcctccaggtgtcacacgccatttcccagtgtcaccgcgaacaccagcgtcccccgctccccagcactccccttttggcgctcacacgcagcgtctgccggccacatgagggcgcgcgcagcacgcccaggcgcccaccctgccccgagaggccgcagggaggaggtggccacagggaggagggccaggcgggagatgaaggggagactcgggaccagaggaagcacggcagggagccagggaccggagggagaggacagaagatggacacagagaaattcacagacaggggagggagatgcagggagagtcagagagacgcagggggctatagggacacagatttagagaaggagcgagctagggactcagagagacagagacggggagggcgctgcggagagagggacaggagaggcagagacagacaggacacagagagaccggggtaggagagagacacccaagccgaaactcagagacagggacgaagacgcagacacacagagatggaggcagaggcggccagagagacaaagagatgcacagagggcgccttccagtggggacccgacgacggaggcggggcctgcagaggcgcgaccgaaggggaggggtccggggcggggtttctaagggggcgtgcccctcggtgtacctgggggcgtgtcccgatggacggggcttggggttctttctggacctggagaaggcgggagccctaggaagaggtggaggtggggaggagcatctttactgcagtcggcccaccctaactcggttttcaccgcctggacagggaagggagacgggcggggaggggaccccgacccgagtccctggtggagatttgggtctcggaccctagctcccctcccccctccccttgcgggctcaacggggccagataaaggagggaaaccaagcccacatctggaaagcatcaggcgcgccggacgtgccagggccccaggcccggctgcggaagaggggaggggagccaaggcgctcctcgccccgccatcggggtccgccggcgccgaggaggggcctgggcgtgtgccgagcctccgcgcctctcgcagctggtttctatcagcagtctggcctgggcagcccccgaggaggaaaccagctcagagagggggaagacagggtgacgatccagtcttccctcccgctcctccaccgcggccagaagctgggggatgggggagacggacagacagacactgcctgccgtgagcgcagcctccgttcctctcctgagctgcagaccgcagcagatgacctcagttcctgtcctgtgccccagcctcatgacagcctagcgcttgaaggcattacagtccccattttttggaagaggaaactgaggccctggattcggattccgttctgacgttaattattcaagaaatcatcaacaaacggcaagagtgaattccaggatcaaatacccagccgcctgggtgtttagtgggtctctcgagctcaacgcatccaatactgagctgattccatcgaccaaaattcgctcttatttcaggtttacccatctcaagtgatggtaaatctctgagtttttgttgttgttttgaaacagggtcttgcctgtcgcccaggctggagtgcagtggtgcaatcatagctcactgcagcctgaactcctgggctcaagtgatcctcctgcctcagcctccccggtaactgggactacaggcatgcacaaccatgaacaggttttgttttgttttttaacagaatctcactctgtcactcatgctggtgtacagtggcacaatctcggcgcgctgcaacctccgcctcccaagctcaagcaattctcatgcctcagcctcctgagtagctgggatcacaggcatgtgccaccaaatccggctactttttttgtatttttagtagagatgggatttcaccatgatggccaggctggtctcaaactttggcctcaagtgatccacctgcctcagcctcccaaagtgctgggattacaggcgtgagccactgtaaccagcctaactttttatttttttttagaggcagggtctggctatgttgcttaggctggtcctgaactgtgagccaccacacctgggctggggtcatccttgactccccgccttctctcacactccacaagtcaccaagtaagacatcctgttggctttatcttcaaagcaattccagaatccaatccctctcacttcctctgctgtccccacttgggtccagacaccgttccctcctgcttggactattacagtgacctctgcattgacctcctatcttctccctgtccccctcagcctgtttcccacagagcagccaaaaggacactgtttcaaactgtccccatataatagcaagtgagtatgtggagcaacctgaaccctcataagctggtggggatgtaaaatggtgaagtcgctttaggaaacaacctggcaggccgggcgtggaggctcatgcctgtaatcccagcactttgggaggctgaggcgggcagatcacttgaggtcaggagttcaagagcagcctgggcaacatggtgaaaccccatctgtactaaaaatacaaaaattagctgagcatggtggtgcacgcctgtaatcccagctacttgggaggctgaggcaggagaatcgcttgaacctggcaggtgaaggttgcagtgagccaagatcgcacgactgcactccagcctgggtgacagagtgagactctatctcaaaaaaaaaaaacaaaaaaaaccctggcagttcctcaaaaggttaaacatagagttaacgtatgacccagcaattccactcctaggtgtatatccaagagcaataaaaacatacaaacacgtatataaaaatgttcacagaggcaatattcataatagcccaaagtggaaacaacacacgttcatcaactgatgaatggacaaatgaaatgtggtctatccagacaatggactatcaattatttgtcaataaaaggaaatgaagtactaatacctgctacaacatggatgaaagttgaaaacagtatgctggctgggtgcggtggctcacgcctgtaaccccggcactttgggaggccgaggcaggcaagttgcttgagcccagaagttcaagaccagcctgaataacatggcaagaccctgtctctacaaaaaaacattaaaaaatcagccaggcacggtggcatgtacctgcagtctcagcttcccaggaggctgaggtgggaggatcacctgaacccaggaggtagaggctgcagggagccgtgattgcaccactactctccaacctgggctaagtgaaagaagccagtcactaaaggcctgtattgtatgattccatttatatgatatgtccagaactagcaaatctatagaaggcaaaagtagattactggttgccaggggctgggaaggttggaggatggcagctgtggtgcagggtttctttaggtggtgatggaaatgttttagaattcattgtggtgatatttgcacaactctgaatatactaaaatactggttttttctttttttttgagactgagtcttgctctgttgcccaggctgaagttcagtggcgtgatctcggctcactgcaagctccgcctcccaagttcaagagattctcctgcctcagcctcccaagtagctgggattacaggcgtgcaccaccatgcttagctaatttttgtatttttagtacagatggggtttcaccatgttgcccaggctgctcttgaactcctgatctcaagtgatctgcccacctcagcctcctaaagtgctgggattacaggcatgagccaccacgcctggccactaaaatactgaatgtcttttatattcaatatatttaaaaacattgaactgtatactttacgtgggtaaattttttggtaggtgaatatatctcagtacagctattaaccctcccccccaccaaaaaaaaaactttaaaaactctcttttatatgctcagaattctcccatgggtgccaggaaataaaaaccaaaatccccaccatagcccacgaggcccccatgatgtgacagtccttacctcttctccctctcacctccccactccagctggcctccttgctgttttgccaacatgccaggcagagttttgcctcagggcctttgcactggctatttcctctgcccaggatattcttccccaagatattcataagtctcactcctccacctccttcaggtctctgttcaaatgtcatcttctcaattagaccattcttttttttttagacggagtcttgctctgtcacccaggctggagtgcaatggcgcgatctcggctcactgcaacctctgcatcccgggtacaagcgattttcctgcctcagcctcccgagtagctgggacaacaggcacatgccaccacgcctggctaacttttgtatttttagtagagacgaggtttcaccatgttggccagggtggtctcaaactcctgacctcaggtgatccacctgcctcggcctcccaaagtggtgggattacaggcatgagccaccatcttctcaattagaccattcttgatcactctacttaaaattacacactcccttggccaggcacactggcttatgcttgtaatcccaacacttcgggaggcttaggcaggaggatcacttgagactaggagttggagaccagcctgggcaacatggtgagaccctgcctctgccaaaaaaaataaaaattagccatgcatggtggtgtgtgccaagctgcttgggagactgaagcagaaggatccctttagcccaggaggtcaaggttgtagtgagccatggttatgccactgcactccagcctgggtgacaaagtgagaccctatctcaaaaaataataagtaaaattacaaactccccgcttcaccaccccacccaatcccctcatatctctggtcagtttttccctatagtcatcacctttaacaaactatagaatatatttattatggtaccaccaccaccacccccagcttccctccctgggacccattcctggtatatcctttttaagatcatggttccagcaaatagaccatgtagggcactgactaaggccatgaactctgaaaatagtgtgcctgaatttgaatcctggctttgccacctatgagcttcagatacatttttgtttgtttgtttgtttgtttgtttttgagatggagtctcactctgtcacccaggctggagttcagtggtgtgatcttggctcactacaaccttacaacctctgcctcccaagttcaagtgattctcctgcctcagcctcccaagtagctgggattacaggcgcccaccaccacacctggctaattcttttttttttttttttttttttttgagacggagtctcactctgtcgcccaggctggagtgcggtggcgcgatctcggctcactgcaagctccgcctcctgggttcacaccattctcctgcctcagtctcctgagtagctgggactacaggcgcccgccaccgcgcccggctaatttttgtatttttagtagagacagggtttcagtgtgttagccaggtggtctcgatctcctgacctcgtgatccgcccgcctcggcctcccaaagtgctgggattacaggcgtgagccactgcgcccagcctccacgcccggctaattttttaattattagtggagacagggtttcaccgtgttggccaggctggtctcgaactcctgacctggtgagacgtgactttcaccttccgccatgattgtgaggcccccccagccacgtggaactgtgagtctatgaaacctctttttctttaaaaattacccagtctcaggttatatctttatcagcagcatgaaaacagactaatacaggtggagaggattaaatgggtcaatatgtgtaaagtggtgagaatagagtccagcacgtcataagtgctcaaataagtgttagctgttattttttgtaagcactaaaaccttaaaagggagacccttaaatatccatccatatttacttcaaccattttggccactaagtgacctatgtagccctagacaaacaaatctcttctcctttctgacttcagttgccccttttatggaatgaagttggagtaattgttcccaaggacctgccaagcaatagcttttcctggaaaaacttttaaaaataacttttattcattattactctaagtgaaacataggtctatccctcaccctacccccaccatagaagctccgtagggcagggtttttttttcctgttttgtcccctgctctaaccccagtgcctggctgggcgctgaagatacaagtgaacacagcaggcctggtccctgctctttccgagctcaaagggaggtagatctacccatgcagattcaaaggtcaaagcagcaacacacaccccatccttctgactgtggattcaggtgggggctgggtcctagccctggatcccccttgctttgtgaccagggaaagtaatggctcttctctaagcctccatttacccacctgagaactgagtataattttacatacccaatagaaaaacaggacgagcacggtggttcacgcctgaaatcctaacacttttggtggccaaggtgcaaggattgcttgaggtcaagaattcaaggccagcctgggcaatatagtgagagttcatctctacaaaaaattggaaaattagccaggcgttgtggtgcatgcctgttagtcccggctgctcaggggggttgaggtgggaggattgctgaagcccaggagttcgaggctgcagtgagctataccactgcactccaggctgggtgacagatcaagaccctgtctcaaaaaaaaataataaaaaataagaaggaaggaaagaaggaaagaaggaaggaaggaaggaaaagagtaaaaaggcaattcacataagaggaaatgcaagagccaataagcacccaaaactatgtgttacctcaaggaaaagggaggaaacgtgctaattaaaacagaacacagtttctccccataagatttgcaaaatgaaaatgatcaatagcatctatcgtttggtgaaggggtagaaaacagacatctgaaaaactgctgttagaaatgtcagctgggggcagtgctaatggatggaagtgtggcagtgtccattaaaagttcttaaattggcatactattaatgaccaagcaactctatttctaggaatgggtcctataaaaatacacacagacatgcacaaagaggcaaatacaaggacattactgtagcaagattcataatagcaaaagaattggagagctgacaatagggttagattatgagaatccccataatggagtcttcttttttttttttttttttttttgagatggagtctcactctgtcacccaggctggagtgcagtgcagtgatcttggctcactacaacctacacctcccaggttcaagtgattctcctgcctcagcctcccgagtagctgggactataggcacacgccaccacacctggttaatttttgtatttttagtagagacagggttttgccatgttggccaggctggtctcgaactcctgacctcaggtggttcacctgccttggcctcccagagtgctgggattacaggtgtgagccacctcacctggccataatggagtcttatatgcacctatcaataataatatagtgataggaaaatgtgttacctaaatttagatgaaatgggccagacatggtggctcacatctgtaatcctaacactttgggaggccaaggcaggaggatcacttcagcctacgagttcaagaccagcctgggcaacataaggagatcccatctctacaaaaagtttaaaaatagctgggcagggtgacgtggacctgtggtcccagctactcaggaggctgaagtgggaggactgtttgagcctgagggttgatgctacagtgagtcatcatcacaccactgctctccaccctgggtaatagagcaagaccccatctcaaaaaacaaaagaaaaaataagtagatttagacgaaatggacaaattcttagatgaatagggcctagcaaaactgacacaagaaaaaatagaaaacctaaatagtactataactatcaaagaaattcaatccttaatttaaaccctcctcataaagaaatcttcaggcacagagatttcacacaaagaagtgataaacactgcatacatatagttcaatttatgtaaatatataatttcacacatatattacatatataactatatgtatattcatacatatatatttatatagttatttagattcatatatatatgcaaacacataaacatgggaggatgcacatcgaactgctgattatgatgaccgtcagagaggggatttaggggctgtctgtttcccatgctgttcccatttttgtgaaaccatatttttttgttttttgagacagggtcttgcttgtcatccacgctggcgtgcagtgacacaatcatggctcactgcagcctgggcctcccagactcacatgattctcccacctcagcctcctgagcagctgatagttcaggaatgacctaccacacccagctaatttttgtattttctgtagagatggggttttaccatgttgcccaagctggtcttgaactcctgggctcaagatatccccctacccctgcctcccaaagtgctgggattataggcatgagccatcacatcccgcctgaaatcgtatttataaccaaacataacccaatcaaaggttagattccttgatgtaaaatagccaatggtaggaagatgatgttgagattcaccctgggacctccctggaaactgccatatccacagcaaacagaagttgctcaataaatgttagtccaaaggaaaaagagcatttctcccatttaatcattcagtgagagtccaccacatatgttacactgtgcatttatttacaaagaggttagagaaacacacagaatctggcccccctttgcactggggagtcaccatcgtcataataaatacagtaattttaaaaaagaaaaaaaatactagattggaacagctgagggtcatcaggcttcccccattccctctcacagggagtgggggtcatgagatagaaaccatcttccttcccctcttctacctccgaatcctccataattgtccagggatcgaagtgaaagagtccttctttccaggtgttaccaacccctacttgaccctcaaaacccccaaatcagtgctccttcccttcccagggcactctgcagggaccacctgagtcagacacagagtctctgaccagggtgccaaggggatatcttaagggtccagggacatggagggggcactttgtgaatgagagggggccatagctgggcaaggaaaggaggaatgagagggctcatcaggaatgagagggagagcggtggaggggaacaaacagactaggcttctaaactaaaacggggaaattcaaaccgaattaccccttttgcatacatggacacttactgtacagatgaggaaagtgacgcccagagaaggggaactgtcttgcccaagggcttccaagctagaagctgaactgggtcaaacagggctcctccccattcctctcggtggtggtgggggagccttttcaaccaagactgttaggagtggggagagtgaggggggtctttggaagcagagaaaacgatggtctttggaaggtagatgtggaagggtcagtggttgggagtgtggaggtgcagaggccatgaagggggagcccaagcaaatccccaaactcacactgtagtcatgaccttgagagaacccgaacggaaacgcagtatctttttcttgagcgcgtgggaagctttgattttcacgaagactttggcggggcctgcgggcgcccctgcacctgctccacccccagaggccgcggtggccgccaccagctgctgcggccacacgaggccaccgctgccgtctgagtcgctggaggcagagctgaaggcaggcgattctccctcgctggcgctcgattcgctctccccgtaacccccgccgacgcctcccgcaggcccccggcgtcccaggggccccaggcgcccagccgagcactcggagtcgctgcccgcgcagccgtaaagcagacgacgctggggagctgacggggacgggccggggccgggaacacgcgccgcaggggctcggggccgcacgcggcgcccatcggcagcgtcgatctccgcagtggagcgccagcgacggcaggaccctgcggcctgggccgccagcgtgggcgctgggccgcggcgtggccgtggaggccgaggctcttcccgctccgccgtggggtacttagggggccccgaagggaccgcggaggcgcggcccagcaggctggtctcagactgggagcgcgaggccttgcgggccctgggcgagccgcggcggcccgaagcctcggccatgcgtccacggcggccggcggcccggggacgctcccggggtggtgactgctccacgctgcggccgcgggtcagtggcggcggtttgcggcgggcggcgcggccagggaggcctcgggtggccgcctgcgcgcccgggatgtactgcgccttcaccaagcggccctcagccgggctgtcggggggtgagggggcggcgggcggcgcagcgggctcgggtgccgcctccgactcccacgacgacgcccaggcgcggctcaaggcggcagggctggtggggtggcccccgacgcgctccaacgagggctcccgcgcgggtcgcgcgctgccgggggacggagacgcgtcgggcggccgctggcgcacgctgttctggcgccgcgggccgccgtccgcgcccccgggactggtccggggctggcccgccccccggcggcggcgcctgcgcaggagcgccgagatgtagccgtccaggggccgccctgcgccccccgcgtcgggcgagtcggtgggagggcggccgcagggccgcgggctgcgcatcgccacggcgtgcagggggctgggcgtcagaaagggcccggcgcgggcccgccgctccgccgaggagcaggcctccgggccggcggacccccctgccgtcgggtagggcgctgagaaggaccgcggcaccgctgcccgcgcgcccaccacctccggagcgctgggactggcgtctcctagggaaggaaggccaaaaaaaaaaaaaaaagagagagtggaggggctctcaaagtcctttcccatttctcatccagcccggaaggggcgggttgcctccctcccttccatcctcatcgcagcaaaaaccctgctctcacaccttccttcttgtaaaattcataataaaatctttacagggtcctacaagaccctgcgtgacttgtcctgcctctgcctctgcctctccaactctcacaacatcttaccccctattttttttttttttttttttttgagacggagtctcgttctgtcgcccaggctggagtgcagtagcccgatctcggctcactgcaagctccgcctcccgggttcatgccattctcctcctgagtggctgggactacaggcgcccgccaccacgcccggctaatttttttgtatttttagtagagacggggtttcaccgtgttcgccaggatggtctcgatctcctgacctcgtgatcctcccgcctcggcctcccaaagtgctgggattacaggtgtgagccactgcgcctggccttttttttttaagacaggttcttgcttgctctgtcacccaggctggagtgcagtggcgcaatcatagctcactgcagtttccagctcctgggctcaagggatcctctcgccttatcttcctgaacggctgggactacaggaacgcatcaccatgccctgctgatttttttattttttgtagggatggggtctcactgtgttgcccagtctagtctccagctcccaggctcaaataatcctcccgcctcagcctcctaaagtgctgggattacaggcatgaaccactgagctgacccttctcctctacttataggactccagccacactggcctcctgaaagcaggcgccagtcacattctggcctcagagcctttctgcttcccattccagattccagatgcccggaatgctcttccttctggatatctgctaggtccactcccccacttagttcagggcacaactcaaatgttacagtctcagtgaagccctccccagccatattttctaaaattgcacttccctccccaaactcaaagggacacttctgagtccctttccccggcttatttcttgtcatagcacatggcattatttcgtaccctagatattttacttatttatcctggtttatttatttatctatttatttatttatttatttatttatttattttttagacgaagtctcgctctgtcacccaggctggagtgcagtggcatgatctcagctcactgcaatctctgccacccaggttcaagcgattctcctgcctcagcctcctgagtagctgggattacaggcacgcgccaccacgcccagctaatttttgtattttttgtagagacggggtttcaccatgttggtcaggctggtctggaactccagacctcgtgatctgcccgtctcggcctcccaaagtgctgggattacaggcatgagccaccgcgcctggccatttatcctgtattttatctattcctccaactaggctggcagtttcctgagggcagggatttgcctgttttgttcattactgttcattttgttcattgctcctgggatactgctaggtagcacatagtgggggctcaaaaacttacttgtatgaatgaatgacagcagttcctgtttaccagtgactgccatgcaccaagtccaatgccttagagcagaggctcactgaatattcaaaaatatccccttagggcaggcactgtttgtgtgtgtgtgtgtgtgtgtgtgtgtgtgtgtgtgtgtgtgtgtgtggttggtgttttatttttatctttttgaggcagagtcttgctctgtcacccaggctggagcgcagtgacaccatctcagctcactgcaacctctgcctcccaggttcaagcaatcctcctggctcagcctcccaagtagctgggatacaggcatgcaccacaatgcctggctattgaggcactgttattataccattttatatttatttatttattttttgagatggagtctcactctgtcaccctggctagagtgcagtggctccatcttggctcactgcaacctccacctccagggctcaagcaattctcctgtttcagtcttcagagtagatgggactacaggcacacatcaccacgcctagctaagttttgtatttttagtagagacaggattttaccatattggtcaggttggtctcgaactcctgatctcaggtgatccacctgctttggcctcccaaagtgttgggattacaggcatgagccactgtgcccagcctatttatttatttattttgagacagagtcttgctctgtcacccagactggagggcagtggcacaatcttggctcactgcaacctccacctcccaggttcaagcgatcctcccacctcagcctcccgagtagctggaattacaggtgttcgctaccacgcccaactaatttttgtatagacggggtttcactatgttggccaggctggtctcaatctcctggcctcaagtgatccgcccacctcccaaagtgctgggattacaggcgtgagccaccgcacccagccatatttcattttaacagatggaaaaacagagacccagaaataagagacctgctcataaccatgtgaaaaggaaatgtcacagctggaattggaatccaggcccgattcggaagtctgtgcccacaaccatcctcctactgtcctttccctggccccagggccccaccctcacccaccttacctagggacttgggcctctcactggcatagatgccccggggctcagagggacccaggcgaccataggagctggatccagagaagccactgtccccacagaaggttgagggtggtgaatctggacctcctgtagagctgggatcttcatagaagcctaaatttccaggagaagcagagagacttcagggggtttgggtgggaaaaccagagctggggaaaggaggagatggcgtggggagagacacagggggcctcagaaatagggatacggggaacatggaggcgtcccaggcaaaccctacccctccatccatgctcacccgagctacgcccgctctcctgttccaggcccccagactccaggctcaggtctcccagctgctgtcccaggtcccagacgagaccaggcagggcctcctgaaggcatagggagagaaggatggtcagaaggcccccagtcctctgccgactggtcccctattccacgagctcatgggcagagtttcactttgacaatgaggctctcgcttcaaaggataaaagcagtacctcagtcccaggaccccctcaagatctgtgtcccttcatccccattagaaagtccttctgacgttccaactccagtccttcatgctgcagccccatctcattccctcttaggtgtgatgaggcctcagaaaacccccatctcttgccctgtctttatcagttgctacccccaatctgtgctcagagcccctcaaccctgattagaatgtccctctttgagtctaacttcaggattgctgtaaggacagtttactgctaaaaggtggtgtccaggacccccagatcccttagtcataggtctgccttcttctccaagtttttctttttttatttttatttatttatttatttatttatttattttgagatagggtctcactctgtcgcctaggctggagggcagtggcgtgatcccagctcactgcagcctctacctcccgggatcaggcaattcacccacctcagcctcctgagtagctgggattacaggcgcccgccaccacgcccagataatttttgtgttttcagtagaggcagggtttcaccatgttgcccaggctgatcttgaactcctgacctcaggtgatccacctgcctcagcctcccaaagtgccgggattacaggcatgagccactgcgcccagcctctccccgtctttgaccttctttctcagatacgcccattgccccttatcaccaagagaaggtccttttgtgagtcttccttaagtccttcctgctgcagattgcctctttcccccatatgggtaaaataggctgaccacgactcataaacgtctttgctctcccttcagaaagaacctcccaagcctcctagacagtcctgtgagtctagccttactggtactgcagcagccatcccagcacgttcctttgccctagagaccacatcctccttctgcctttggtccactcccaccaggaagctccagtgagtctacctttcctcatcgccatgagaaatttcggggagtcaggccgggcgcagtggctcacgcctgtaatcccagcattttgggaggccgaggcgggcggatcacatgaggtcaggagttggaaccagcctggccaatatggtgaaaccttgtctcccttaaaaatacaaaaactagcggggcgtggtggtttgcgcctgtagtcccagctactagagaggctgaggcgggaggattgcttgagcccaggaggcagaggttgcagtgagccgagatcacaccattgcactccagcctaagcaacacagcaagactgacaaaaaaaaaaaaaaaggaaaaaagaaaaagaaatttccatgagtctaccctggatccttcttgctgcaggaaaagagcacttctcacggatggggtctccaagacattaggacttaatctcattttagaaaagagagggtcagagccagaaaaagtctcacatgggtctgagtgaggccgggtagcagcaggcagcctcgggctgacggttgaccctcagacaaaagcggcttgtctggaccgcaggagggagggaagtggggaggagggtttgggagggcaggcacccaaccctgcctatttagggcagaaagactggccggctccccggcagccacaacccccccgccccatcccagtctctccagggcccagcctctcccatccccctagaacagaagcccccatccgggcctgtttatttgaggaaggtcaacaaatccttccactctgggctcctgccctgggtatattgagatgctcacagtgaagtcatctttgagcggaactcaaaaaagcagctgaattgtgcagcatcaggaagtaactaaaaaaaaatctctcggacctaccatgtaccccatgtcacgtccgtcacaaatcactggcatgctcactcccctctagccacgcctggccttgccaccgtccctcgaacataccatgtatgcgcctacctcgggagaatgtttcccccacataccttccttgcttcattcagatctttggtgatctcttctctgacacctttccaaaatagctcccctgtcattgtgtaccccgttgccctgcttttcgggttttttctacatatcagtaatgacctcttgatttaaaattatacatcaggccaggctcggtggctcacgcctgtaatcccagcaccttgggaggccaaggcagggaggatcacttgaggtcaggagttcaagatcagcctggccaacatggtgaaaccccgtctctactagaaatacaaaaaatagccaggtgtggtggtgtgtgcctgtaatcccagctacccaagaggctgaagcaggagaattgcttgaaccagggaggcggaggttgcagtgagccgagatcacgccactgcactccagcctgggcgacagtaagatttcatctccaaaaacaactaaaataaaataaaagtatacatcaaggtatcatttgtttgttgaatctctcactagaatgtcagccctaggaacgcggagatttgtctgtttagctcacaggtgcacccccacccagtgcctagaacagtgcctggcacaaagtgggtgctcaggaaatatttaatgggctgggtgtggtggcttatgcctatcatcccagcactctggaagtgccaaggcgggaggatcgctggaggccgagagttcaagaccagcctaggcgacatagtgagacccagtctctctctctctctctctctctctatatatatatatatatatatacacaaacacacatatatatatacacacatatatatacacatatatacactatatatacacacatgtatatacacatatatgtatatatatgaaatttatttatttatttatttatttatttatttatttttgagatggaatctagctctaccgctcaggctggagtgcagtggtgcagcctccacctcccaggttcaagtgattttttttttttgcctcagcctcccaagcaggtgggatgacaagcatgtcccaccacacttggctaatttttgtgtttttagtagagacagggtttcatcatgttggccaggttggtctcgaactcctgactacaagtcatccgcccacctcagcctcccaaagtgctgggattgcatgcgtgagccactgtgcctggtcttttttattttatttttgagacaaggtctcactgtctcaccaggctggactgcagtggcacgatcacggctcactgcagccttcacctcctgggctcaggtgatcctaccacctcagcctcccaagtagctgggactacaggcacatgccaccacacccccgctaatctttgtatttttttgtagagacagggtctccctgtgttgcataggcttgtctcgaactcctgggcttgagcagtcctcccgcctcggtctcttaaagtgctgggattgcaggcatgagccattgcacccagctgtctattttttaaaaagaaatattagatgaaagaatgaatgtatacaatggaatactatacagctgttaaaacggaatgagtcaaatttctatatagaatcattaccaagatatagcattgagcagaaacagaaaagggcagaatatatatagtatgagtgactcagaattacctggagggcttgtgaaagcccaaatgactgagtcccattcccagagcttttgattacagcctgcagtcacgcccaagtagttgtatggctaacaagttccatgtcatgtggtgctgctggctaggaggccacactttgactggcatagtctctgggacctcacccaagaaactagaatttgtaaaaagcaaagctttgacaaaagctctacgttttttggtatgtaaacagtttctgttaggagatatgttggaagaggtctgggaggtgacactaaggtgacaatgatggtgacctcaggggataggttggatttaggggatccagggaggaatgaggggactggatggtggaaggaagtgtttaaggaggcgtgacttggcatcacattaagctctgctgctccccagctgtgtgaccttgggtgggtgactttacctctctgggcttcagtttccttatctataactgggcatcataggacaccatctcctggaggttattgtgaggattaaatgagtttctttttttttttttttttttttttttgagacggagtcttgctctgtcgcccaggctggagtgcagtggcacaatctcggctcactgcaagctccgcctcccgggttcacgccattctcctgcctcagcctcccgagtagctgggactacaggtgcccgccaccacgcccagctaattttttgtatttttagtagagacggggttccaccacgttagccaagatggtctcaatctcctgaccttgtgatctgcctgcctcggcctcccaaagtgctggaattacaggcgtgagccaccgcgcccggccaatgagtttcttttgacacataataaatgccagtttgtatgattacaggaaagctatgaatttcttataaggaaaatagaaaatgtttccattgtttaattaaaaataaatgtaggtgtcgggcgcagtggctcacgcctgtaatcccaacaactttgggagaccgaggcgggaggatcacttgaggccaggaattcaagaccagcctggccaacatggtgaaagcccatctctactaaaaatacaaaaattagccaggggtgatggtgcatgcctgtaattccagctactcgggaggctgaggcaggagaattgcttgaatccaggaggtggaggttgcagtgagccgagaatcacttgaacctaggaggtggaggttgcagtgagcagagattgtgccattgcactctggcctgggtgacagagcaagattctgtctcaatgaataaataaataaaggccaggtacagtagctcacacctgcaatcctagtgctttgagaggctgagacagaaggattgcttgagcccaggagttggagaccagcctgaacaacatagcaagacctcatatctttaaaaaaaaaaaaaaaattagccaaatgtggcggtgtgcacctgtagtcctagcttcttgggaggctgaggcaggaggattgcttgaggccaagttagaggctgcagtgagctatgatcgtgccactgcacttcagcctgagagactttgtctccaaaaataaatgaataaataaatatatcatttaaaaatacataaataaacgtgaaaggatagactttttggtaagttctgccaagtctaattccggttcttccattacaaggaagagcagaaattagggagacagacaggagatgcctcctcctctccagcacctagacgccccccaaaaatattccaagtctacacccctctatttgcaagtctggcctcattccttccagttgcaaaaggatgaatctttaaaagattagaaagtccttggcctgagtctggctctctgcctcctcacggtgcccctcatccttcctctgcaggcttaataagagtgtggttaggacccctggagacccctttgcccaaacttcccttaccttgtttctcccctcacgtgcccctcgttggtatccagtgcccatttatctctattaggaagtcattctgcaagtctaacttaagttattcttgatgaaaggaacctttttccttcttgagagcaagcaggacccagggagcccctgccctcacccaggattcctgcctctcttctctgccacacccctgatctttacctggtatccccatcattcctattagaaagtaatcaagtctggcttcagtctttcttgccttgaaggaagtgtattcctggcaggggctgggggtggggggataagtcataagacaagggttgggggatcagaagaagccctaatccactcttcagagggacccaggaacccccagcactagagaagtttatatttagcgcttctctgctcctcctcctccccccgcctgccaccgcctcctccctgatgctgggacaagctttgcctagagactggggggtggggggacaggcctctccactatcagctcgtgccgggaggacagagggctgagggggaggaggggacagagggaccgaggagagggagactgaagggcagagatggggaaggtgaagggtgaaaaggggagagaccgagggcagagggggagaggacacagctacccacagctaccccaacctcatgcctcgcattctccttgtcaggatggaaggcgccttccaagccgagccagcttggggtggggggagctagcgaaggcccccacaatccgtctctaactttgggagggggtggggcctcccacagctgtttctgtttccagaaaagaatgtgcaggggggtcccactcctgagagggggaggggccgggcgtgcagccccgggagcctggcttcagtcttcctccccactccccatctggggagggggcggtcgaggtcagcggcggggagagccccctccactgccacctcggctcaggtttcccgaaacgggaagctctggccacacacaggcttggggatggggatctgccgtggagccagggtgtgcgggctggggggaggggaagacagactgagcctgggacgtcgggcaagaagaagagagcgaggtgcagacaggcaggaagggaaggccaaggagacagatgcagagggacacagagatcacagagacagagagacaggatgaagaaagagaagcagacacagaaagtcacagggatgtggcaggacggagagagtgacagaacccaggacgagatcgggagactcaaggaatgacatagaaaggggagaggcatggggcgtcctcaagtcattccggagacctctgcccatcttccaccatgagaacacccagagtccagaagtctcccccaggcgctgcctcgacctgcctccccttgggtcaaggagagctggggccaggtaggaagcaggggaagtgtcaccaaagggtcaagatcccagtggggggtcctcagggactgtgagcttcctctcagcagtggtccctccctctggaggccctgagattcccctcctcccaccccgccccctccagagatctccaagcacaccaggacttagggaagatggagccctggtggcggggcccagagaagggcatgtttggagcctggctgtgtcaccttgggtgagtcgcttgctctctctgagcctcaatttgtttctctgttaaatggggactatcaccccgtttcccaagccgcaagaagacaacgcctgcaaagtacccggtctcgggtttgacacatacttggcgcccacaaggattttctttggggaaggggtgtaagagacagggcctgtgtttctcacgaggccccagtgggggcgatgcagttccccctcccccgatttgggggcggggaggccaggtccggcccgccgccggaactccggggtcgccagccccaccccctgtcctttctcactccctgcctacccgggtccccaacccccgcccggtgtctgagcatccaaccgagacagacagacacagacgggggtggagggacggacggacaggcagccccttaccagctgctcctccagggccgctgcggcccggcgcgccgccgccgcatcttcatcctcatcggcgtcctcctcgtcctcggcctcggcgccccccattccgggctgggccagccgcagcgcctgctgcacgcggtactcctgcctctcccggagccaatgtaactcgcagagcccggccaggctaccctccagccagccccgcagccggccccgctcagggctcaccgggaacgagaaggcccggatcatggctgcggccccccgccccagcccggccgggccccgcggccacccctctcccggtcccacctccccgccccagcagcctgcccgcccgcccgctggccgggctgtcaccgtctcatctgcataggcgcccgcccattgggccgcccacccgcgccttatctgcatggccacgcccccggcgaccgagcaacagccgcctattggcgaataagcttcctgacgaagactctcgggcgtgcaaccgcaccgcccaacacgacgcatgctcgcaactgcctactcactccgctcgccacgccccctccgtgcaactgcctcggggccctggccacgcccccccacgcgtcacaatgaaacaagcccgcccttgcttcaatgccattggtctgtgcctggccggtcctgcagcaggttccaccctcttgcgggcgagcgctggctaccattggactgtccggcgcgaggggaagggtgatctataaatagggaatgggtacacgtgacagtttggcagctgctcctacccctccaccccgcccaaccttcagcttctgaggctgcgcagggggagaaaagggttagggggtcgagccctgacttcgcctcctcttccaagaagccttcccagacactcagctgtaaaaccagacggacgtcctccgatgaaattgtttctacttagggccggcttcaccggcttggaatccacttagaagggtcttcgcgcttggttgaatgttctgcaatttctgtcttgaaatttttagtttttgagcaaggggccccttattttcactttgcactaggccaaatatgtagccggtcttgctgctaagagtctaagatcgattgcattccaaattctggaattataagaccctgggtggaagattctatgctttgaccagaagagagtctaagcagcttttgtctcccaggtgctaggaggatgtgtgctcatcattcttccattccaggggcctttgttctacgttctaaggggctttgttctcagccttctatgatgctctattctcaacgttctctggtcctaggagtctgagcctgacattcgtttccaaggcttcctgctgtctctccaggctccgcaagcagggctggggcaccctcaggcggccaatctgtatcactacgccgagcctgcctctaccaacttccaagacctagctctaatattcatactcatctctcagacagaccttggctccctaaaagccaaggcccagaagatcatacaagaaattccctcttttatgattccccgtgcacgaagtgaccttctggtggtgagatggagagaaattgatagtggcgatagacagcaaagtctccaggagccagacttcctcggggtgagtcacagatctgtcactttccagctgtgtgaccttggaaaacttacttaacctctctgtgccaccgtttcttcatctgatcacgggatcataatactggctgcctcatacagttgttctgaggattcaatgaaatgtattaggtacttggagcagtgtcttccatggattaagagccacagaagggtttgacaaataagtttaaaaactaatctagtaagtttccggggggaaatgtcttgaaatttattagagacaacctttattcagtcttcctcttgttcaaaatagacttagaaaattagtcgggtgtggtggtgcacacctgtagccccagctacttgggaggctgaggcgggaggatcacttgatttcctttttgacttcttgatgcttttattaatgatgatgccaaaagatttctggagaatcagccaggcgcagtggctcacgtctgtaatcccagtactttgggaggctgaggcgggcagatcacctgagttcaggagttcagatcagcctggccaacatggcgaaaccccatctgtactaaaaatacaaaaattagctgggcatgatggcacacaccgagactgtggcactgcactccagcctgggtaacagagggagactccgtctcaaaaaaagaaagaaagaaagaaattgagagagagagagagagaaagaaagaaagaaaaagaaagagagagagaaagaaagatagatgtctggagaatcaacaagcaacagttgcttccaaacatggcacacaaactggatatggtggcatgtacctgtagtgcgagctactcaggaggctgaggcaggaggatcacttgagcctgggaggctgaggctacagtgagccatgattgcaccattgcactccagcctgggtgacagagcaagacccaatctttaaaaaaaaaaaaaaaaattgtgattacagagactgagtcccatgcaggggctgttaatgaagttgcagaagctcatagaccttgatttatagatggtagggatgggaagaggttcccataaaaatcgagtggtgcgttgggagaggcctttgaggaaggcgtgtagggcacagtgctccatccaaaggctttggtggtgcgagtgaaggggatggggccctgggagtagtgatttgtgctgagaaaggggaacaaaactgacaatcctaattgcagttgtaagactgagtaaacacttttgcaaaagtaagccaggggcattgtggatcttgcaggctggaaggtagaatagggaggggagatgtgtcatttgggaagagacagaagttacagctggagaattgtgatctgagaagcatgtaatcaaagatcagtcaaagagaatgcaaatgaggccgggtggggtggctcatgcctgtaatcccagcactttgggacgcagaggcaggcagatcatttgaggtcaggagttcaagaccagcctggccaacatggcgaaaccccgtctctactaaaaatataaaaattagctgggtgtggtggtgcacgcctgtaatcccagctacttgggaggctgaggcaggagaatcgtttgaacctgggaggtggaggttgcactgagccgagatcacgccactgcactccaacctgggcaacagagggaggctctgtctctaaataaataaataaataaagagagagagaatgcaaatgaaaggcaaaagtcatatgatgagaagcaggcacgggaggaccagagtgggtattaaaatggggaatcctagccaggctctgtgacatgcacctgtagtaccagctacccagaagacagaagcaggaggattgtgtgagctcaggagttcaaggccaacctgggcaacatggtgagaccctgtctctaaaatagcgtgtgtgggagggaatcctggagtttctgattccaggagcaggctgtctcatgatgttgtctgcttaacccaaggttcttgggagagctgtctacaattgcagcctcgtctgcttccagggctcttgaaagagcctccctctgaggtctccaacgggagtggattcccattcagcacaggtcttatatctcttcatctctgagatatgaacccaaggcaggacagtctggtgtttgcaatagtgtagggtccatcccatctgagttcaaggttagtcttcctgcgatgtcttttccggaggactaaattccctgtttggaaattatgaagaggccgtgatggagtatttggagggaaggcagctcacacttgttagtgacaagcataagtgtacttagtccttgataatatctgagaatgtcgattgtaatagattagagtcctcaagggcccaataggagtagaatccttgtgagtctttgagtgattatttcataagaagattattgatatgtgctctggtaggaagagtaatggcccccccctaagatgtctacatctttatccctggaacctgtgaatatagcaccttttatggaaaaaggaactttttgtgattaagaatcttgagatagggagatttatcttggattatcctggtggacccagtatcatcacaagtttccttataagatggaggcaagaacgttagagtcagagaaatatgtaaatatagaagcagaggccgggccaggcacagtggctcacacctgtaatcccaaagctttgggaggccgagtgggggaggatcgcttgaggccaggactttgagaccagcctgggcaacacgtttctacaaaaaaaaaaaaaaaaaatcaaaaaattagccaggcatgatggcgcacatctgtggtcccagttatctaggaggaggatcgcttgaggccaccagtctgatgctgcagtgagctgtgattgtgccagtgcattccagcctggggcgacagggaaagaccctgtctcaaaaaataaaataaaataaatctgtgttgttttaagccaccacattcatggtgatttattctagcagtgtattcatttgctaaggtggccataacgaaacactacagacatagtttaaacgacagaaatttattttctcaccattctagaggccaagaagtccaagatcaaggcgtcggcagggctggtttcctccgaggcctctctccttggcttgcagatggtcaccttctcactgtgtccacacatggtttccagtatgtgtgcacacatccctgtgcctctctccttgtcttttttttttttttttttcaagacagaatcttgctctgtcacccagattggagtgcagtggcacgatctcggctcactgcaacctccgcctctcaggttacagtgattctcctgcctcagcctcccgagtagctgggattacaggcatgagccaactcacccagctaatttttgtatttttagtagagacgggatctcaccatgttggtcacgctggtctcaaacttctgacctcaagtgatctgcctgccttggcctcccaaagtgctggaattataggtgtgagccaccgcacccggcccaaaaaactttttaattagctgggcgtggtggtgcatgcctgaagtcctggctactggggaggctggggaggaagaatcacttgagcccaggaggttgaggctgcagtgagccatgattgcaccactgtgctccagcctgggcgacagagcaagactctgtctcaaaaaaaaaaaaaaaaaaaaaaaaaaggaaagaaaaagaaaagaaaaaggaaaataagctaatgcttgtggttatggggaagtcaagggacaacagtgggcaagggtaagttcaattcttcagttagtttggcaagtttaagtttgacgagactgaatcggcatgttcaatttgtcctgatgatcataggcaatagggctaaaggatttctgtgaaatgggagtacccactggttctctggattagcctgcttgatatggtatgggtaggctttgtgacccacccaaatctcattttgaactgcagtcctcaggtgtttaaggaaagacctggtgggaaatgattggctcatgggggctgttcttgtgacagtgagggagttctcacgagatctgatggttttataaatggtagtttttcctgcatttacacacacgcactgtcttgcctactgccatgcgagatgggcctcttcaccttccgccatgactgtaagtttccttaggcctccccagccatgtggaactgtcagtcaattaaacctctttcctttataaattacccagtctcggccaggcgcggtggctcaaacctgtaatcccagcactttgggaggccaaggtgggcagattacttgaggtcaggagttcaagaccagcctggccaacatggtgaaaccccatctctactaaaatccaaaaaatcagccgggcatggtggcacgcacctgtaatcccagctactcaggaggctgaagcaggagaatcgcttgaatccaggaggcggaggttgcagtgaactgagattgcaccactgcactccagcctgggtgagagaaaaagaccctgtctcaattattaactgtggtcactgtgcagtgcaatgggccgctaaaatgtattcctccagtctagctgaaactttgtacctttgatcaacatctttcctgggtcaggcacagtggctcatgcctgtaatcccagcactttgggaagccgaggtgggaggatcgtttgagcccgagagttcaagaccagcctaggcaacacagtgaaaccttgtctctacaaaaaaaaattaaaatcttccttttcctcatcccccctctggcgctgagtgtgctgtttgggctgacttgggttcagggaggcatggaaacactatgagcttgttgaaagtcagaagagagcctactgcttagaaatttcctgccgggtgtttaaggtgaagggccatccacaaagagggtgacacgagattgtcacatggaggctcttcaaggtcaggacaagaaagaataagaatctggggcccgggggcctgacgcagtggctcacgcctgtaatcccagcactttgggagacccaggtgggtggatcacaaggtcaggagatcgagaccatcctggctaacacggtgaaaccctgcctctactaaaaatacaaaaaattagccaggcatggtggtgggtgcctgtagtcccagctactcaggatgctgaggcaggagaatagcatgaacctaggaggcagaggttgcagtgagctgagatcacaccactgcactccagcctaggcaacagagcaagactccatctcaaaaaaaaaaaaaaaagaatctgggtccgggcctggtggctcatgcctgtaaatcccagcactttgggaggccaaggcacaaggatcgcttgaggccaggagttgggaaccagcctgggccacatagtgagaccctatctccaaaaaatttaaaaacttagccaggtatagtggtgcatgcctgtagttccagctagtagggaggctgaagcgagaggattgtttgagcctgggagtttgaggctgcagtgagctatgatcgtgctactacactccagcctgagtgagagagcaagatcctgtctcaaaaaaaaaaaaaaaaaaaaaaaaagcatgttagggagctccaattccccaggcaatccttccttgcctcttcccagcttctggtggctcttggcaatctctaacattatttggcttgtggctgcatcattccaagctctgccttcatcctcacatgcttctccctgtgtcttacgcggccaccttctcataaagacaccactcggccaggcgcggtggctcacacctgtaatcccagcactttaggaggccgaggcgagcggatcacctgaggtcgggagtttgagaccagcctgaccaacatggagaaaaccccgtctctactaaaaatacaaaattagccgggcatggtggtgcatgcctgtaacccagccactcgggaggctgaggcaggagaatcgcttgaacccgggaggcagggtttgcggtgagccaagatcgcgccattgcgctccagcctgggcaacaagagcgaaactccatctcaaaaaacaacaaaaaaagacaccagtcatgttgcattaggggcccaccctactccagtatgacctccttttaactgattacatctgcaatgaacttatttccaagtagggtcatatcctgaggtactagggagacaaaattcaaccaatgaccagcccagaaaccactggagttgccttttagtcttggataaaacaaaaataataatggtataaatgcatgctgtgtggataaggttttgccttcaagggcaaggtcatgccctaaatcttgtacttatgaattacatagttataatttatcctagacacccttttttttttctgagacagggtcttgctcttttgcccaggtggagtgctgtgatgcaatctcggctcactgcggcctcaacctgtcaggctcaagcaatcctcccacctcagcctcctgagtagctgggactagaagcatgcatcaccacactcagctaatttttttattttttatttttgtagagatgggggtctccctatgttacccaggctaatctcgaactcctgggctcaagtgatcctcccaccttggcctcccaaagtgctgggattacagacatgagcctgtcctttatgagcaagggcttggggccgatttttatttgtttttcctacttcctgtataattgcagaaacttggggcacgtgtggagtgtgagtgagtgagctgctggaatgaactgaccagacaggacatcatctatgtatgggattagaatggaattacaggagaaaaccaaatccctcaaattagcattcaggatcggaaaaaaaagtaagtaggggtttcaacgaaccactgaggcatagcagtgtatgtatgtttactgttgactttcaaggggaaagggaaatggggctgtggatcatcaggtgtgtgaaagaaggcagagggcatgtgagtacagtcgagtgggtggtgttggccggtctagaatagaggccagtataatgtttggattggaaatagcaggaaccacagtgtgactattttgtttacagccttgaggtcttggacttgctggtatcctttatcgagactgttattgggattttgttttttttttttttgagacagagtctcactctgtcacccaggctggagtgcaatggcgcgatctcggctcactgcaacttctgcctctcgggttcaagcaattcttctaccttagcctcctgagtagctgggattacaggtacctgccgccatgcccggctaattttttaatttgtttttagtagagacggggtttcaccatgttggccaggccggtctacaactcctgatctcaggtgatctacccgcctcggcctcccaaattacaggtgttatcattaggattcttggcagacaggagtgttgtaggggatggaagtggatagtaggaggctctgaataatgggttgggggccctagtgtgcctctggtgtcagagcacattaaggcagcttcaagaagggcatgaaaagatctaattctattccacaacttggggtaattggttaaaaaaaaaaaaagggagccaggtgcagtggctcacacctgtaatctcaacactttgggagaccgaggtgggaggactgcttgaggccaggactttgagaccagcctgggcgacatagcaagaccttgtctctatttaaacaaaattttttttaattctaaaaagaaaggatctacttctaccttaagaggttcagcctcccagaggcaccctacatttgttgagttgggggctcaaagagaatcaggaatgcaagtcacagatcttggatatgtaggtctgagggagaggtggatgttttgggaagggggtggttggagtggtgggaaagttagtggactgagatgaacaagggcagaattagggactgggagacataagccctcttgtgaatatgaaatattatggctttggctgggcacggtggctcacacctgtaatcccaacactttgggaggccaaggcaggtggatcacttgaggtcaggagtttgagaccagcctgtccaacatggtgaaaccctgcctctactaaaaatacaaaaattagccggttgtgatggtgtgcacctgtgatcccagttgcttgggaggatgaagcaggagaatcgcttgaacctgggaggtagaagttgcagtgaggtgagatcgcatcactgcactccagcctgggtgacagagcgagactccatctcaaaaacaaacaaacaaaaaagaaatattattgttctacgttgatagaacatccctttctaaagggattattggagtaatttgaataagaaactgtgctgggtagtagagagcccaatgagcccaagagtggcttagacaggcataaaccatgtggctaattgtggtctcatcaccattattgctgtgtactgaggtagggaggggggactgagatatttatggcaaagcatgtggcccctgtgtctacaaaaaccctggcaggatgctcattaaggggattgatggtcatttccccctgaaggttaaggaatccttatagacacagaggagaaagttggctggaagtgagtcactgggagactgaatcttagactcaaattccttttgcatttcaaagctaaatagtgtcaagtccaatgtcccttttctttacagtatatacaagtgtctctatcaacattaggttttgaggttgagtgcagtggcccacacctgtaatcccagcacttttgagaggtggaggatcgttcaaccccaggagttcaagaccagcctcggcaacatagtgagaccccatctctataacaaataaaaaacatgcccgggcacggtggttcatgcctgtaatcccagcactttgggaggccgaggtgggcagatcacttgaggtcaggagttcgagaccagcctggccaacatggcaaaaccccttctctactaaaaatacaaaaattagctgggcgtggtggcatgtgcctgtagtcttagctacttgggaggctgaggtgggaagatcacttgagcccaggaggttgaggctgcagtgagctgtgatcatgccactgcactttggcctgggcaacagagcaagattccatctcaaaaaataataaaataataaaaaaattaaaaactacataaaaaacaaaaaattagcgaggtgtggtggctcatgcctgtagtcccagctactcaagaggctgagggggaggatggcttgaaccctgtagtttgaggctgcagtgagctacgatcataccactgcacagaagcctgggtgatagagcaagaccctgtctctaacaaacaaaattaggttttgtgattccagtggtcctgataggataaactttttgtctctaatgatttaagttatagggccctaagttttcattgtatggatttgatttttttttttttttttgagacagagtttcgctcttgttgcccaggctggagtgcagtggcacgatctcagctcaccgcaacctccgcctcccagattcaagcgattctcctgcctcaacctcccgagtagctgggattacaggcatgtgccaccatgcccggctaattttgtatttttagtagagacggggtttctccatgttgatcaggctggtctcaaactcctgacctcagatgatccacccacctcagcactcaaagtgctgagattacaggcgtgagccactgcgcccggccttgattttatctttcatggcatcctcatgatatacactatctcctggaattctataattgaggaatgtttttgaatcacgtctctcatttctggtctctggatattaactagtggccaagacagaagcagatcaggggtgatagtcttttccatacattttctagcctgggtctgtcacgggagatggattcatctctatgttgcctacacttctggaccttagactaaacagagggataggcactggggatggagtctaagagcctttccccaatagtcttagcaactatgcctcagaggtatactgctcctttggataccttcatttactgaggctcgtttagcattttcaaatcaaagagctgcattttggccaggcgcagtggctcatgcatgtaatcccagcactttgggaggcctaggcaggcagatcgcttgagcccaggagtttgagaccagcctgggcaacatggtaaaacctctgcaaaaaatccaaaaaattagctgggcatggtggcatgtgcctgtagttctagctactcaggaggctgaggtgggaggatcacttgagcccagaaggtcaaggctgcagtgagctgtgttcatgccactgcactccagcctgggaaacagagaccctgcctcaggaaaaaaaaaaaaagctgcagctctggaaccatcagatggacaaggtgatacaaatcaaattggaaaatcccagagtaagctcccagtattagcctaaattggctactaaattctttcctgttttcctgggttttttaaggctgtgttgcccaaactggactcgaactcctggactccagcgatcctcccacctcagccgcttaagtagctgggaatacagtcacccgccaccatgcccagctttcagataggtctttgcagcacgtaagtcagagcgttctgaaagtctgaagaaaacttgttcaggtccatgctcggatcgttcaccttcagctgtggaaggtggaggaccatgtgttagggtgttactggagaactggggaggtggagggctggagtcaaaggtagagagaggtggatacgtgttccctccagttcattccctctgccttcagtctttcaaggccaagatgaagcctaagaggtcacctctgattccccactctctctgacccctgagctcattctaggctgcccaagcctcccaaactcccccagtccagcccttcccgttctgggtcatcactgtccaggggcaggtatgtctctctactggcagggcagtccttggctgtctcagtcaccactgtgtccccagcatcacccagctcagtgacacaaaggaatgagtgaatatatacttctctatttcatagatagagaagtcatcacatcaacataaaataaaatactgaatgttacgtatcagttttctagtatggatcagacttgggctaactgcattttattatttgacttttgagacagggtctcactctcttgcccaggctagagtgcagtggtgtgtgatcttggctcactgcaatctctgcttcctgggctcaagcgatcctctagcctcaacctccaagtagctgggaccacaggtgcaagccaccacacttggctaatttttgaactttttgtagaaagggagtttcaccacgttggccaggctgctctcaaactcctgagatctaagggatctgcctgcctcggcctcccaaattgctgggattataggcatgagccaccacacccagcctgaattaatagttgtgattagtagtaacaccaccaccaaataaaaaatcagtcatcacaaaccatgagattactttttctccaagttctctaccctccagtcacattccttccatctctccccagtttccaactcctcctccattactcctccctctcccttctcatcttctctcctggcactcttcctgtatattttctaccccagctcgtcctccttccaagactcctctcccatcagtcctctctccccaccccttccatccttcctcttttcaggcagtcctccttccagatgaactccatgttggtacaacagagtaatgattcgagagtgccgtgtgctgagatcaaggccatggggccagagatgagtccgttttaattgctggggaaacagggaggggccttggaaatagctccccccaccccactccccacgtgtcccatccagtttgggcaggaagccactttccctagaacagttcattgctgggatcctgtgaagaaccgctgtggagggcagcagctggacgagggcacaggacctcagagaacactgatgcgctccgccagcccctgcatgtcgtggtcctgtggtggacaggccccaccgagatccctgtccgtgggcagcccagacccaggcagcggatgctctgctgcaaactgctcccagcgcgcgtcgtcactctcatgcgtgatgtatcgctctcccatcttcccctccagctctcggaggtccagccacgtctggtactcctgggcccgagagaactggggttagcttggggtctgcattggagcagtgcctggatatcctctggtttgccactgagagctgggtaccaatgaaggtgaagccataccctctgcaacccacccagccagtagacatttagctccaccccctcttcctgcacccagccaatgggaggcctagccacattccagacccaaggaaacctacatccttcacaacctgcctagccaataagcgatctactcccaccccttcctccaatccagccaatgggccagccctgccccctgcatcacctgtaaccaggggtggctgagagatttgtccacgctgtagcgtttgcgcatcttcacctgcagcaggttgttgatgaggtcaatggctgcacaggaaagagaaacaggtcaagccctacaggtcaagggtcactcctcctccaataggcaccccctagcctacctgcctgccatcaacaccttccttctgcaccagctcaggtggctcagaagcctcacctgtgccaatcactcacccacccatttcctcattacattacaaatttgtctcctcctgcccatgcatgttcacaccagctccctctcttcacctgttctctacttcaatttccccattcccctatgtcacctttttttttctttttgtcatatacaggtacatacaattacacctgtactattctttttatttttacttatttatttattgagacagagtctcgctctgtcgcccaggctggagtgcaatggcacgatcttggctcactgcaacctccgcctcccgggttcatgtgattctcctgcctcagcctcccaagtagctaggaatacaggtgtgtgtcaccatgtcctgctaactttttgtatttttagtagagatggggtttcaccatattggccaggctggtctctaactcctgacctcaagcaatccgcctgccttggcctcccaaattgttgggattacaggcatgagccactgcgcccggcctaaatggattttcaacctacaatacttccttttttttttttgagacagggtctcattgttacccaagctgaagtgcagtggcgtgatcaatgctcactgaagcctccacctccccagcttaattgattctcctgccttagcctcctgagcagccagctgggactacaagcacctgtcactatggccggctaatttttgtattttttgtagagatacattgcccaggctggtcttgaactcctgggctcaagcaatctgcctaccttggcctcccaaggtgctgggattatgggcttcagccactgcgcctgaccaacttatgatattttcaatttacaatgggcaatgggtttatcaggtttatctaaccccagtgcaaatcagggagcatctatgtcatcaggctgggcgcggtggctcatgcctgtaatcccaacactttgggaggccgaggcgggtggatcacccgaggtcaggagttcgagacaagcctggccaacacggaaaccccgtctctactaaaaatacaaaaaattagctgggcatggtagcgcatgcctgtagtcccagctactcaggaggctgaggcagaatcgcttgaactcaggaggcagaggttgcagtgagccaagatcgtgccactgcactccagcccgggtgacaaaagcgaaactccgtctcaaaacaaaacaaaacaaaacaaaatgtcatcagatggtagttagtcaccattgcctgcagaaggctcagagataggcctgttcattgtgaaaaagaggactagcgaatgtcaagcttcaagacaagccagcactcatccgaggctctctccttgatgggaagccatgaaggacaaggcttcactgtatgaacccatccgaggagaggcctggtgcacacaggcaccctgctcccgtcaacacccacaggattctgtgatcctcacacaggtgcaaccacacttaaattcacttgtgcacactcgatgcacttttactgagggacttctgagtgggtctcaaaagacaatgctggcggggtgtgatggcttatgcctgcaatcccagcactttgggaggctgaagcgggcaaataacttgaggtcaggagttcaagaccagcctggctaacatggcgaaaccctgtctctactaaaaatataaaacatgagccaggcatggtgctgtgtgcctgtaatcccagttactcgggaggctgaggcaggagaatcccttgaacccaagaggtggaggttgcagtgagccgagatcacgccactgcactccagcgtgggtgaaagagcgagaccccacctcaaaaaaaaaaaaaaagccagtgttgagcacccccaatattactccaggactcaagtcaatccacattctcactgcttagggcccatgctcttagaccaccaccaagaccttgtcttgtcctgcaccgagcaacctccgtgtcaccctgctccacctgctccatgaagccgcaccctccagagaggacccttcccctttccacccttcgcggaccactcaatgagctaccctgcacctgaccccttctgtccaagtcatcacagtattcccagagctggaacagtcaatgcctggcacatcgtgggcactcaacatgttgaatcaatggttacaaatacatgaatgtacttgttgaataaatggttataaataaatgaatgaatgatccccccccttcccatactccatctgtcttcctgagctccctggctccaacacaggtcccttgttctcctggcttctgacacaccccagtatcttagccctgcctctggccctctaaacatgccatcccacacccagcctcaaagctccaggccttaggacttaacttttccaagcagggaaagttacagacccattcccaagtaggttcaagtcaccaggcccggtgccacttcatcaggcccagccacaacaccaaagccccagaatgcagagtgcaatgtctgcctcagtcctggctcccttctcctccccactcccatccactcccagcttccaggactcagggtcagccctgttcctggacctcttcggaaaccctccacggccacgtccctagactggctcccttggtcactgaaccgaccccaggcttcaggcccatcttcacccaagtcacggccccagtacacagcaaagtagccatgcccttgtttctcaaccctacccaccggtgcctcctttttgcaaggctgacccttttggggtcgtaaacccaaaggctccaggtcccagccaatgccttgggaggctcagccccttctcctggtcaccgcagccctttggtaccctcaagtccagtccctttcctggtcccaccctagacaagccaagtctcactcagcccccctaaggttccaagtgtcctcagcgcttctggggcacttggtttccagcccaagtaacctagtctaggcctgagtcccagcccatcttttacaggacggctcctcctgtagccacatccctccagtaggcccgccccagcactgggctccacccccaaggtgccaggctgtttccgggtccacccccctctcatggctccgcccacttctccagccccaccccacaacccacccgcccatggggtaggcgggccccaggcacctccagctgagatgtggctccaggggctggccgggtacatgaaggcggcgttctggatctggtcattgatgtcctcatcctcgttgaaagggaaggtgccgctgaggctgacgtacatgatcacgcccactgaccacatgtccagcgagcggttgtagccctggttgagcagcacctcgggtgccaggtaggccggcgtgcccaccactgagcggcggaacgacttctcgccgatgatgcgagcaaagccaaagtcacacagcttcacctgcagagggcaagggatggaggctccaccaggtgatggagccgcacccaccccagcatccccaccacaccaccctccatggtattccagagaaagctggatgctggtttgaatccaggctccttggctcactagctgagcaaccctgggcaggtgacttcccccctctgtgcctcagtttccccatctataggaagaagagcagaagagcacctatctcagaggactgccatgatggttagtgaattaaaccatccaaagcccacaggacaatatttggcattcagttggtgcacaataaatgctagctgctgctatacctctgccacctccaatgggtcgctgtttcctcttttgaataatgcagattttttttaatagcctcaaaatatacatgattggggcgtggtggctcatgcctgcaatctcagcactttgggaggccaaggaagatggatcatttgaggtcaggagttcgagaccagcctggccaacacgatgaaaccccatctctactaaaaatacaaaaattagcacacgcctgcggtcccagctactcaggaggctgaggcaggagaatcgcctgaacctgggaggcagaggttgcagtgagccgagatcgcaccactgcattccagcctgggtgacacagcgagactccgtctcaaaaaacaaacaaaaaaaacatgaaacataatggagatcttaacagtccctaccttaaagggtgcttgtttagactgaaagagaaatgtatgcaacgtgttaggagcagtgtctagcacagaatgaccctcgatgatctcaggtcaaggacctaatttctccaggccttgattttgtcatctgtattggggggttgttgatagcagcctcctctcaggctttcctggggattaggtaggagtgggtgctgactgcggtagctggcagacagtatggtgtatgcctacctttccttcattgttttattttttttgagacggagtctcgctctgtcgcccaggctggagtgcagtagcgtgatcttggctcactgcaacctctgcctcccaggttcaagcaattctcctgcctcagcctcccgaatagctgggatcacagggacccgccaccatgcctggctaatttttgtatttttagtagagacgacatttcaccacatcagccaggctggtcccaaactcctgacctcaggtgttcctcctgcctcagcctcccaaagtgctgggattacaggcatgagacaccacacctggccccataccctcattgttaatggctgcagtctaaggtcatggacaggctttggagccagcaagacctgggttcaaggtcttgctctgctgcctacctctcagccttggttcccagctctgttcatgtactgtcctttccctgttcaaaacccttccttggctcactgttgcttgcaggatagagccccaaatccttgaagcctgaagcctctgtcacctttgaaaccagccacgcctcaacccctgacctgaatctcaatgtgacagccaccctttcctgaggtactctgccctttctacagatcttatagctctttctcttttccaagatctatactttcctatggatcttttttaaaatttttattttattattatttttttgagacgagtcttggtctgtcgtccaggctggagtgcagtggtgtgatctcggctcaccgcaacctccaccctcctgggttcaagcaattctcctgcttcagcctcctgagaacctgggattacaggttcccgccaccatgcccagctaatttttgtatttttagtagagacggggtttcgccatgttagccagactggtatccaactccagacctcaagtgatctgcccgcctcagcctcccaaagtgctgggattataggcatgagccgctgcgctcaaccagaaaacttttaaatatgtttggaacaacttgggcatgtcaatctatttccccaactgttatacacaccagattttgaagacatagtatgaaaaacaagcagaatgtttcattgagttttgtttcttttttaagagacagggtcttgctctgtcaccccagctggagtgcagtggcacaatcatagctcacttcagacttgaactcctggtctcaagccgtcttcccatcttggcctcccaaagtgcggggattataggcatgagccacctcccctggccttaataatttttatgttgactacatgttgaataaagtgctatatgttgggataaactatatatatatatatatatatatttttttttttttttttgagacagagtctcgctctctcgctctgtcacccaggctggagtgcagtggcgtgatctcggctaactgcaagctccgcctcccgggttcatgccattctcctaactcagcctcccaagtagctgggactacaggcgcacaccaccacgccccgctaatttttttttgtatttttagtagagaaggggtttcaccgtgttagccaggatggtctcgatctcctgacctcgtgaactgcccgcctcggcctcccaaagtgctgggattacaggcgtgagccaccgcacccagtcttttttttttttttttaagagacagctctcactctgttattcaggctggagtgcagtggcacaatcatagctcactgcagccaccaactcctgggctcaagcaatcctcccatctcagcctcctaagcagctaggactataggcgcacgccaccattcccggctattttttttttcattttttgtatagatgaggtctcgctatgttgcccaggctggtctcaaactcttgggctcaaatgatcctcctgcctcagcctctcaaaatgctgattacaggcaagagccactgtgcctcgcccccacatcttgattagtataatccccttccccacccccaccccggccatcagtgttgcctggatttccccaaatcaggaggggacataactgacctgaggaaatgggtctgctgatgccagcaacacgttttctggtttcaagtcacagtggacaatgttcttgaagtgaaggtgtctcaaagccaccaggatctgaggggagcagatgggcccagtaagaaaggtagataggtactcagccaaatcccaacctcagcagccagccctccaaacccatccatacttttttttttttttttttgagacagagtctcgctctgtagcccaggctggaagtgcagtggcatgatctcagctcactgcaacccctacctcctgggttcaagtgattctcctgcctcagcctcccaagtagctgggactacaggcgtgcaccaccatgcccagctaatttttttttttctttttgaggcggagtctcactctgtcgcctgggctggagtgcagtggcacgatctcggctcactgcaacctctacctccagggctcaagtgagtctcctgcctcagcctcccgagtagctgggattacaggcgctggccactatgcccagctaattttttctatttttagtagagatggggtttcaccatgttggccaggctggtctcaaactcctgacctcgtgatttccccacctcggcctcccaaagtgctgggattacaggcgtgagccaccgggcccagacttgctctgataattttttcttttatttttagtagagacagggtttcaccatgttgaccaggctggtctcaaactcctggactcaagtgatccacccaccttggcctcccaaaatgctgggattacaggcgtgagtgagccactgcgcctggccccatccatgccttcctacacacccctgcagacaccccagccagggaaacaggaggcactggagcaccaaagaatctcagaatcatagaaccatttacatctgagagataagagttaaatgtaaactagaaagtctgggctagatgagtggggctgtgaagatcccaagatcttctagcatgtggtaaactcctgaatgctactgacagagcaggcatttccaagatccaactatgtgattctattttttttttttttttttttttgagacagagtcttgctctgtcactcaggccagagcacagaggcgggatcacagctcactgcacctcgacctcccaggctaaatccatcctcccacctcaacctccctagtaactgggattataggcacacaccatcacacctgactaatttttgtatttgtagagacagtgtctcaccatgttgcccaggctggtctcaaactcctgcactcaagtgatccacccacctcagcctcccaaagtgcttggataacaggcgtgagccaccccacctcacccattttttttttgaagagatggagtctccctctgtcacccaggctgaagtgcagtatcattctacagcctcaaactcctggggttaagtgatcctccagcctcagtctcccaaatagctaggactacaggcatgtgccaccaccaccatgtcgggctttgattccttttttttttttttttttgagaaggcctcctgattctcctgcctcagcctcctgagcagctgggattacaggcacacaccaccatgcccggctaatttttgtatttttagtagagacggggtttcatcatgttggtcaggctggtcttgaactcctgacctcgtgatccaccaaccttggcctcccaaagtgctgggattataggcgtgagccactgtgcccagcctgatttcatttttaaaaaaaatatttttcatccttacaaaaaactttggctgggcatggtgactcatgcctgtaatctcagcactttggaaggctgaggcaggtggatcacctgaggtcaggagttagacaccatcctggccaacatagcaaaaccctgcctctattaaaaatacaaaaattaggcgtggtggtgggcgcctgtagtcccagctactcgggaggctgaggcaggaaaatcgcttgaactggagaggtggaggttgcagtgagtcgacatcgcgccattgcactccagcctgggcgacagagtgagatgccatctcagaaaaaaaaagagtaccaaccttacaggttgctataaggtttaaagcatatctaaagatgcatgtaaaacgcttaggatagctaaccactgtatgttagctgttactgttgttgttattagttattatttttgtgatggcttgttggtaaatatatttgtttgtgtctcttaaataaagcttctcctgctgtatctgttcctatgataaggtgagctgattaaaaaaaaaattaccatttgtaaccattcatctgtgagaatcatatttcttgattctctgtaactcaaaatgccaagtacaccagaagcaattgtacaactgcaattattatctgtctcggagtttaaatacttgtgtatctgtctcagagtttaaatacttgtgtttattctgattgttttcttttttaaaaaaatctttttgtagagatggcatctcgctatgttgcccaggctggtcttaaactcctggcctcaaatgatcttcccacctcagctacccaaaccttgagataataggcacgacccaccatgcctgaccaacctcctcattctacagactgggagaccaagctggaaagatgcatgtgttgtatatgtcatctccagattgtttttttgagatggagtctcactctgttgcccacgctggagtgcaacggcatgacctcgactcaccacaaattccacctcccaggttcaagcaattcttgtgcctcagcctccccagtagctgggattacaggtgaatgccaccacacctggctaatttttgtattattagtaaagatgggatttcaccatgttggccaggctggtctcaaaactcctgacctcaggtgatccatctgccttggcctcccaaagttctaggatgacaggcgtgagccacctcgccccgcccatttccagattttgtcagttgattttctcccagttcatgtgaacaaagagggcaggttaggccgggcacggtggcttacgcctgtaatcccagcactttgggaggctgaggcgggcagatcacgagatcaaaagttcaagaccagcctgatcgacatggtgaaaccccatctctactaaaaatacaaaaatcagccaggaatggtggcgtgtgcctgtgttcccagctactcaggaggctgaggcaggagaatcatttgaacctgggaggcagaggttgcagtgagctgagatagcgccactgcactccagcctgggcaacagagcgagactccatctcaaaaaaaaaaaacattggccggatatggtggctcacgcctgtaatcccagcattttgggaggctgaggcgggtggatcacgaggtcagaagttcaagactagcctggccaacatagtgaaaccccgtctctactaaaaatacaaaaattagcccggtgtactgggacgcacctgtagtcccagctactcaggaggctgaggtgggacaattgtttgaacctgggaggcagaggttgcagtgagctgagactgtactattgcactccagcctgggtgacagagtgagacttcgtctcaaaaaaaaaaaaaaaaaaagaaaagaaagagggcaggttggaagctagatagatccagactcaaatcttggctggaaagctacttggctgtgacctcgagggagactgctatctccctgagcctcagtttcctcatctataaaatggggtttataacaatacctacctcctaggatggtggtgaggcctacataagctcaggaggtaaagggcttagcacagggcttaggtgtggggcaggcaagagcccagaaagcagaaatctgcagagagagagagagagagaaagaagagcgagcaggcaaaaagagaggaagagatgaaggccagaaagagaaaccccctcagctgctgaaagcagccacctgtgagaaccatgattcctttccacacctgaagtctggatgtggccgggcacgatggctcatgcctgtaatcccagcacttcaggaggctgaggcaggcagatgacttgaggtcaggagtttgagactggcctgggcaacatgatgaaaccccatctctactaaaattacaaaaattagccaggcatggtggcacacacctataatcccagctactcgggaggctgaggtaggagaatcacctgaacccagggggcagagggtgcagtgagccgagatcgtgtcactgcgctccagcctgggcaacaaagcgagactctgtctcaaaaatacataaataataaagtctggatgagggtgcatcagtgggtttctgtccccaccccataagccagcctgacaaacacaggcacactgcctgagaggataagggtgctgggccagggtaaagggaacacagcaacgatggctctgagacccacagagatgtctcagaagaaggcaaggcacccaccagaaggaagcctttctaggaaggatgtgaaacacagaaaccacacaaggggatatttaacatcgtaaaagttccactctatggccggctggacgcagtggctcatgcctgtaacccagaactttgggaggctgcagcaagaggaccacttaagcccaggagttcgagacccaacatggcaagaccctgtctctacaaaaacataaaaaaaaattagccaggtgtaatggctcatgcctgtggttccagctaactcaggagactgagatgggaggatcgctcgagcccaggagttcaagaccagcctgggcaacatggcgagaccttgtctctacaaaaacattaaaaaaaaaaaaaaaaaaaattagctggacgtggtggctcatgcctgtggttccagttaactcaggaggctgagataggagaattgcttcagcctaggagtttgaggctgcagtgaactatgattacaccactgcactccagcctgggtgacaaaatgagaccctgtctcaaaaaaaaaaataaaataggccaggcgcggtggctcacacctgtaatcccagcactttgggaggccgaggcgggtggatcacgaggtcaggagatcgagaccatcctggttaacacagtgagaccctgtctctactgaaaatacaaaaaattagccgggcgtggtggtgggcacctgtagtcccagctacttgggaggctgaggtaggagaatggtgtgaacctgggaggcggagcttgcagtgagccgagatggtgccactgcactccagcctgggcaatagagcaagactccgtctcaaaaaaaaataaaaaataaaataaataaaaccctatggtaaataaaaactaaatataaaataaagaggcaaacactgggataaaaccattgaacaatataagtgataagaatctaatgtgcacctccaccaaaaaaaaagaaacgcagaacagaggccgggcacagtggctcacacctgtaatcccagaactttgcgaggctgaggccgagtcaggaggatcacttgagcccaggagttgaagaccagcctgggcaacatagcaagtctttataaaaatgtctttataaaaattagctgggtgtgatggctgatgcctgttgtctcagctactcaggaggctgaggcaggagaattgcttgaacccgggaggtcaaggctgcagtgagccatgattgtaccactgcactccagctcgggtgacagagcgagaccctgtctcaaaaaaacaaacaaaaagcacaggcacacaaggaaaatctgtttgaatgtaacacaaatgagtttgacatcactagttaaaagcaaagatcctaggttcaaatcccaccagctatgtgaccctggacaagatatttgatgtctctgaccctcagtttcttcaaccataaaaggggattgataataatagcacctactgcacaggttactatgaagattaaatgagtttgaagagtgcttggcacatagtaagtgctcaataaatgttagtgaccacattatttatcatcaccattatcagcctcccttgtcctagccctgctcacctgagctatcactgtctaagaatggggctgtattggtcatccctgtgtcctcaacactgaccagcaagggaccaagcacagagcagggactagggagtgtttgttgaccaactgaatgaatgaatgagagaaaaagggctgcttgcccgttttttctattgtttggttttgagacacggtctcgctctgtcacccaggctggagtgcagtggcacggtcatagctcactgcagcctcaaccacctaggttcaagagagcctctccactcccttcctcccaagcagctaggactacagacatgtgctaccaggcaccacatccagctaggttttctatttttttttttactttttgtagaggtgggatctcactatgtcgcctaggctggtctccaactcctggcttcaagcgatcctcttgccttggcctcccaaagcgctgggattacgggcatgagccagcctgtttttgagatgggctcttgctatgttgcccaggctggctcaaactcctgggcttaagcaatcctctggccttagcttcctgagtagctgggattacaggtgtaccccaccatgcctgactccccttttttctagatgagtcaagtcaggtccagggagcctgactgatcatttattttttataataaaaatagctatcattaccgctagtctatttttttctattattatgattactctttattattattattattattatttttttttttgagacgaagtttcactcttgtcccccaggctggagtacaatggcacgatctcagctcactgtaacctctgcctcctgggctcaagggattctcctgcctcagcctcccaagtagctatgattacaggtgcctgccaccatgctcagctaatttttgtatttttagtagagacagggtttcaccatgttggccaggctggtctcaaactcctgacctcaggtgatccacccgccttggcctcccaaagtgttgggattacaggcgtgagccaccgcgcctggcatactctttatttttaattgttattgtcactattatttttcttttttctttctttctttttagaggcggggtctcgctatgttgcccaggctggagtgcaatgcctcttcacagatgtgatcccactactgatcagtaagagagctttgacctgctccatttccaacctgggctgctttgcaacctggtggtcccccactcctgggaggtcaccacatggatgccaaacttaatgaggacacctgatcagcacagaactcctgggatcaagtgatcctcctgcctcagcctcctgagtagctgagaccacagacacgtgctaccatgcccggcttattttttctattatggttattattacttctgtacgattatggttccttttttttttttttttttttcttgagatggagtcttgctctgtcgcccaggctggagtgcagtggcgcgatctcggctcactgcaagctccatctcccaggttcacaccattctcctgcctcagcctcccgagtagctgggactacaggcgcctgccaccatgcccggctaattttttgtatttctagtagagacagggtttcaccatgttagccaggatggtttcgatctcctgacctcgtgggcctcccaaagtgctgggattacgggtgtgagccactgcgcccagcctgatgatggtttctgttatctgctattgtgactcccccaagtgtctgcttgaccccctaggcatacagggcctctccaagctgacacctgatggggaggggcgggtggcagcgggcagggcagacgcacctgggtgatgaggaacttggtgaggcgctcaggcagccggcccttctcactggacaggatcatctccaacatgtccccatgcagcttctccatcaccacaaacactttctcaggcgtctcgaacatgcactccaggttcacgatcccgggatgccgcaggctctgcagggtggggagcggggtcagggcccaggtaacccacaaactcagaccccaacgggtcaggtataggagcaggaggatgacaaacaaggagaaggatgtccctggggtattggcacttggagagggaagggggcttcccacaggccaagacagaacaggcccacctccaccccacctgccaggtgcccagaaggatcttttttttctttctatttaaatatagagatggggtttcgccatgttggccaggctggtctcaaacttctggcctcaagtgatcctcccacctcagcctcccaaagtgctgggattacaggcgtgagccaccatgcccggcccagaaggatctttacatcctgaaattctggtggaggcccagggttgcaggagggaggagggggagcttggagaaatggggagagctctgcacatctgtatcttttaaatccataccccctctcacattctccagtcctatcctggcctaacccctctctcccacccagatccccactcagcctcctggctacaatcacttccctttccacccaccctccagatggcagcctgcgggattttcctaacgtacacacctgatcctgcccctcccttgctcaaaagccttctgtggctctccagtaccctcaggagaaagtccaaagggtctggctccgccctcctccctggcctcatctcccagtacctcctttctagaaaacctcatgctccctctcaccaggtctttgtacaggctggtccctctgctaagaacaccttctccccttcagtctcaacatgcacatgccctcccccaggaagccttccctgaccacccctacactgggtcagctggcccatgaaaggaagaagcagaaagggaaggcggcctggtggttacctgcagaatggccacttcattccggagctggctctcctgcttggtagggaagcgcagtttgtcaatgaccttaactgccacgtcccggcctgtcttccggtgttttcctgcacagggagtagaagagatgggggatgagagagcaagaccacccagtcctggcaggagtatctccacctctgccaacctctgccccccaccatggagacagccagagttgggcagagttggaaggccccaggagatacgtgaaaaggccacctgaggtgcaccttgggagtaaaggcagaaagaaggaaagcaaaaaacaaacaaaaagctccgaagaagggaatgtataacatgggaaactggatttataaccagtcggaatctagcatctagttttgtgtgacccgtaagagtcctggggacaggggagagacaccagcaccaggggaggcagactgaccatattatacagagaaggaaactgagtcttagagtttagagtgtagaagttaccctccctgtcctattgaactctaggatctagctctgtggcaaatcaaagtgtaaaatttaccacccgccccatacaatcagaatctaggatttagcctgtggccaatcagaatgcagaatctaccctccaatccaatcagaatctaggatctagacctgtggccaatcagaatgcagaatctaccctcctattcaatcagaatctaggatctagctctgtggccagagtgcagaatctaccctcttttccaatcagaatctacgaactagttctgtggccaatatgaatgcagaatctactctatccaatcagaatctaggttctagctctgtggtcaatcagagtgcagaatctaccttccctatccaatcaaaatctacctctgtgaccaatcagagtgccgaatttacccttcctattaataacaggaggaatgtccattggtttttcccaatgagaaaaggagaacctgcaatcagtccacccaggatctagctaagccaatcaacatgggaggtgagcatgtgaccaatcagaaaggaagggttggagccagaaagaaagggctggagccacagcagcttcccccagcccggggctccctctgggttagctctgaagtgtcctcacctccatagaccactccaaactgccctgagcccagcacttcgtcagggaagatctggtagacagtggcaatgtcctacagggtgaagacagggcaggtcaggggtgcaaatggaaatggggaagggggagtcaaggagacgagagagctgaggagggtttgtgggaggggagggcatcaggtgggggcaggagtctcaccacattctcttggatctgactgttggacacagagatgctcagagaagcttgtcctagggagaggggagagacagaggtgaggggactccaggctcaggattatctccacccatacctgcaaaagcagacttgggagtcaggccacccagatttgaatccaatgttcgatacaatgtgcaacttcaggctggtgacttgtccactacgaacctcagtttcctcatctagaaaatgggaataataaaaggacctccctcatagagccaccaggaggagtaaatgagatgtgctgagtggctaaaggagtgatgttacagatgattttgctgagcattttaccccaggatctcagcaccaggggaggcagactgaccccattgtacagagaaggaaactgagtcttggagggaaagcccagactgactcctgcatcttcccttgaacttttccccctacaaacccaaccagagccagacatttctaaagtccgatccttctgccatttgaatgtctctctcttccaccagtctaggcccctgctcgccccccaactctgggtcctcaccccacagccccttccctggtctccttgccccaatcctgccccttcctactcacctcccacagagaaaccagagggatcttactgaggcacaagactgaccctgtccctcctctgctcacaactctgccatggctccccagtgccctcaggaagaagcctgagccccttaaatggcctaaaagccatggcctagaccctcatctacctctgacttctacccccaacatgctattcctgacacactggcctccttgctcggcctcaaatacagcaaactctcttctgccttctggtctctgcatatgctgtttcccctgccaggaatactctttccttcatcctagacttagctaaatcctcctcatcctcaagtgtaagctcaaatgtcactcctaggaccaagttggattactctcgcaaatgctctgcatcacactcgttgcttgtatgggttaatgatcaatgtctgtcacccacactggattataagctccagagggtgggaacctggtactctctcaacattttttgcctctgcctaaaatgacctcccattttctttcccacatctcaccctgcctcggcctccagatctcagttcagatgtcacctcctccaggaagcccccctatatacccagattgggtcaggtacccctctgggctcctctagctccctagcttccttgtcccaaccctgcccaccctggactgtcactctctgaagatgggtattctgccctactggactctgagccccatgagggcaggtcttgggctgtcctggccaccactgggtccccagcactgtcccgcacagaggaggcactcagtaagtgcatgaggacttatcagcacctgggacaaggctcatggaggggaagtgatatgcccagggccacatatcaggccaggagcttaacagagatttgttgtggatttttgttgttgttgttttttctgttttggagacagagtcttgctctgtcacccagactggagtgcagtgatgcaatcatgactcactactcccaggctcaagcaattctcctgcctcagccttccaagtacctggaactacaggtgtgcaccaccacacctggctaattgtttttattttttgtagagatggaatctcattatgttgcccaggctggtcttgaactcctggcctcaagtgatcctccctccttggcttcccaaagcgctgggattaacaggagtgattaacagagtttgaacccaggcctgctgagtccagaagctgcgttctcaaccccaccattgcccactttcctctttggcccttccattccccagaaccgtgccccacccatctagatctattctctcaaggacccgaggtgggaggacttactgtggggcgcgtggcctggggcgctgggtgcgtcctgaaggatgacgggcatcagggcctggcggatggctgtctcccagccccgggcggcctcagccccctgcccacttggcccacccggagtcccgccaggcatctcgcccacgaagtaggtggcattggcagtgacgatctcaaagcagtgtgggttggtgcccggcggcacaaggctgaagttctgggcggactccaccgtgaggatttctgacagcggaatttcctgcaggacgtggaaccagcacaggtgaggatgccaggcagaccttggaattctagtgcttacccagaaggatacacgggatccatgttgatagggatgggcctggtttgcacagtggtcagacaagttcccagtaattctaagcctgttctcactgttcttttataattactggcagaggccaggtgcggtggctcatgcctgtaatcccaacactttggaaggccgaggtgggcagctcacttgaggtcaggagttcgagaccagcctggccaacatggcaaaatcccgtctctactgaaaatacaaaaattagccaggcgtggtggtgtgcgcctgtaatcccagctaatcgggaggctgaggcaggaaaatcgcttgcacctgggaggcggtggttgtaatgagccaagatcgcaccactgcactccagcctgggcgacagagtgagattccgtctcaaaaataataataataatactaattactggcagaagtgatattgaagcagagaccagaaaggtaagaagcagccagttggcaaggagtaggggaacagcatgtgcaaaggccctaaggaaaggctatgctcaaaagccaagctgtatccccatcacatgggcggtgcctggacatagtaaaagcttgataaacatttgatggccggatgtggtggctcgtgcctgtactcccagcactttgggaggccgaggtgggcagatggcccaggagttcaagaccagcctgggcaacacagtgagaccccagctctacaaaaaatttaaaaattaggcatggtgccacaagcctgtaatcccagcactttgggaggccaaggcaggcagatcgctggagcccaggagtttgagaccagccagagcaacacaatgagacccccatctctacaaaaaataaaaaaactagccaggtgtggtggtgcgcacctgtaatcccagctactgtggaggtgggagaatcatttgagccagggaggcagaggttacagtgagccatgatcatgccactgcacctgggagacagggcaagagcctgtctcaaaataaataaatgggctgggcatggtggctcatgcctgtaatcccaacactttgggaggccaaggcaggcggatcacaaagtcaggagttcgagacccgcctgaccaacatggtgaaagcccatctctactaaaaatacaaaaattagccaggcgtggtggcacacctataatcctagctacttgggaggctgaggcagaagaatcacttgaaccccggaggcggaggttgcagtgagccaagatcgcgccactgcactccagcctgggtgacagagcgagactccgtctcaaaaataaacgtttgataataaatggaggaaatgaggccacacagggctttgcgggccacaaggaagagcctgggctttgtccaagggccctaggaagccactgaaggcttttgagcatcatccgcttgtgtgcggagggcagatggaatagaatgagatggagacagagaaccaggaaggaggctgaggggacccaggcgggacagaaggcacagggactatggggtgggaaacgtgtcaaaagaggaaggagggaggtaggagagaggaaagaatgaatgacttaggcagcccataaaaccaggtgatgacatggacacgtcgggggggcatggtgaggacagcattatattttattttattttatttttttgagatggagtcttgctctgttgcccaggcaggagtgcagtgacgcgatctcagctcactgcaacctccacctcccaggttcaagcaattctcctgcctcagcctcccaagtagctggggttataggcacccgccaccatgcccagctaatttttgtatttttagtacagacaaggtttcaccatattggccaggctggtttcgaactcatgatctcaagtgatccgcccacctcggcctctgaaagcgctgggattacaggcgtgagccaccacgcctggccaaggacagcattttagatggtgtggtctgagcaaaatgggaagatgataaggaaccagccatggaaagttcaaggaagacgctccagggcaggtaacagctggagtccaggttttattactctaagacaatgggagccactggggggtttgacggttttaatgaagactcccctggctgtgggggaaatgacagaggttgtgaggtcagaagcaaggaccctgcaaggagaaggctgaaaccatccaggtggaagacagtggctgggacacagtgtgggcatgggaggtggtgacgaatacgcacacaatgcaatacattaattataaagaaatagtgaggccgggtgcggtggctcatgcctgtaatcccagcactttgggaggccgaggggggcagatcatgaggtcaagagatcaagaccatcctgtccaacatggtgaaaccccgtctctactaaaaatacaaaaattagctgggtgtggtggcattcacctgtagtcctagggtgggaggctgaggcaggagaatcgcttgaacccgggaagcggaggttgcagtgagccgagatcgcgccactgcactccagctgggcgacagagtgagactctgtctcaaaaaataaataaataacaaaaaataaaggaatagtgagaacagccttagaattactgggagcttaatatataccacgccttaagccaattggtttagtggattggctctttgaattctcgcaccagccctgaggtgagtattagcatttgaggcattttgcaggtgagaagcgtgaggcactgagaagtaagggaacctgcccggagtccccctggctggaaagtggtggggccagaatcggatgggcagcacttgctgatgagctggaagcagggaggctgggggtgggcagagggtgtgatttgcaggatctgtctggagtaactgggggtaggaggaggtgtgggaaagtttgtgggcacagcgggaagtccgagggagctgaaagcccggaggcttaccttatagtatctgttggtcgtgttgttctggaagagcgtgatacacttgcagtccaggcgccaatagtgccgctttctctgcagagatgtttgaagagtcacgtgaaccgccagactttcctgcccagtccctatcccgtggagctgcttggggctccaggtgcctggagcaccacgtgcacgccgtaactctagcacctaccccacgccgtaaccccaccccaccacacgccctaaccccagccccgcccctagccttaaccctagcccagcccccacgccctaaccccagactcgcccccacttagccctcttcctccagccaagctcctcccctaactctagccccgcccctgaccttgccctgagccccgggtcttccctaactcctgcccgtagtcccacccttacagcccacacttctaattctagccccgcctccagcacggcccagcccactactggccccgctcgcgcctagctccagccccacccacctagccccgcctactcaagctgagccgcccctcttccagccttcgctccgccgtacccggccccgccccggccactcaccagcgtgtccttgttgctgtaatgaaccacccaaccctcccgcagcgtggtgctggatttccgcgtcgtgtgtcgcaccgattgcaccaccctcattagggggatgtaccccagggagctgcgaaggaagaggaaggggtgagaagtcacatgcagaaagtgaccatgctgcttgggaatgcagggggcatctctgggaaactagggagttggggactgtttttgtttgtttggtttgttttgacattttccccccaacacacacccgggagttgctttttgtttgtttttaagaggctcgctctgtcacccaggctggaatgcagtggtgcgatctcggctcactgcaacctctgcctcccgggttcaagcgattctcgtgcctcagcctcctgagtggccgggacaatcacggtgaccattaggtgcacgccaccacccctggctaatttttgtatttttagtagtgatgaggtttcaccatgttggccaggctggtctcgaactctttgcctcaactccttccctaactcctgcccctagtcccacccttagaatcccttcacgagatccatccgcctcggcctcccagagtgcttacaggtgtgagccaccacgctggcccagaaggagattcttgagagggcttctgtagtaggcctttctgaagtcaggctgcctagcaaattacctaacctcttcatgcctcagtttgtccacccaaaggggatgctatgaggaatggaaacctttctacggagcttagtacagtgcctggcatacagaggacctccagtaagtgctaattggtatttagtccagcaattgtggagccagctgtgtgacactgggtaagtgattcaacctctctgggcctcacctccctcatttgtgcagatgctgttagtacagtaaggaaggtctacagagattaagtggcctgctgggcatggtggctcatgcctgtaatcccaacactttgggaggcagaagtggggggatcacttgaggtcaggagtttgagatttgagagattaagtgacttgctcaactctggaaccaacaatctctggatccctgtgctagatcagaacctgggtggccttgatcacatctctttgcctgagactcagtttccccatctgtgaaatgggctgcctctccccacacccgccacccccaatccctcaaggtccaactcttgacagtgtatgacggtgttactaggcattcccaggaaagacgtgggagaaagggaacctgcggcttcaggctgcttgggttgggaggcaccgcaggaaacactctgtcgtcactgtgactggcttacccatcccctttctgtccaaccctcttcccctcgccctccctgctgcagctacatgggtctctttgctgtccctggaacacggtgcctccaccccagggcctttgcactcgctgttgcctctgcctggaagccttttcccccagagccccacaaggctccttccctcccctcccttcaactgccacttcctcagcgaggtctccttgaaggaccctaagatagcatgtcccccattctccatctcctcttgtttttatcaccattaccaatacccgatgctatggatgcatttattagctgtctccccactgaggcagtcagctccagaagggcagacttttacctcttttgttcatagctgtgtgcttgaacacagcaggtgctcattaaatattttccagtgcacctgtgagggtgcccccttacccctaccccaggtttatcaccccgtggggtaggtacctcatcgccccaggaggaaaccgtggcacacagggaagcgcctagcaagtgaagtggtagagctgggatctgggctgtcaccctccagcgcctgtgtgaactgtgctttctcaataaacattcacgccacacccagataggaagtgcctgatctgagccagtcctgtcctaggcacctgggagggcagaaaatatccttgccctcatgcacctgagctcacattccagtggagctgactaagtatgaactccgtgtatagtttaaaaatgtgtaggctgggggcacagtggcacacacctgtaatcccagaactttgggaggctgaggtgggaggattgcttgagcgcagaagttcaagaccaccctgggcaacatagcaagaccccctatcttaaaaaaaaaaaaaaaaaaaaaagaagaggaatataggtcaggcgcggtggctcatgcctgtaatcccagcactttgggaggccgaggcaggtggattacctgaggttgggagttcaagaccagcctgaccaacatggcaaaaccctgtctctactaaaaatacaaaaaaagtagctgggcctgggcgggtgcctgtagtcccagctacttgggaggctgaggcaggagaatcgcttgaacccaggagacagaggttgcaatgaactgaaattgcatcactgcactccagcctgggcaacaagagcgaaacgccgtctaaaattagccagggatagcagtgcatccctgtagtcccagatactcgggaggctgaggcaggaggatcacctgagcccaggagtttgaggttacagtgagccacaatcacaccactgcactccagtgggcaacaaagcaagaccctttgggaggctgaggcgggtggatcacttgagctcaggagtcaggagttcaagaccagcctgggcaacatagggtagaccctgtctctacagaaatacaaaaattagctgggtgtggtggacgagcctgtggtcccagctactcgagaggctaaggtggcaggatcgcttgagcccaggtggtcgaggctgcagtgagtcaagactgcaccactgcaccagcctgggcgacagaccgagaccctgtctcaaacaaaaaattatttaaaaaaaattgtagtgctttaaaaggtttgcctcaggaactgggaaaatttataaatatgaggtgatgtcagcccattgtagagaaaaagaaattgaggttcactgtgcaggagggtcttcccccagggtctcttggagggttctgtgtatacctctgggccttgcctccctcgccttcctcctcctcactggcgtggagcgcattctctgagtgggagccagggatgacaccggagtcctctgactcatccatgagggcgctcttgtcagcctcgctgaaatcggtggcctcctccatcggcacatctgtggggacggaggcatcagaggggtctccacccagtcctgccccttcccctttctccccagcatccccccagcctctcacctccattgataagggcctcccccaggcagtcattagggacgcgggtggcgcagcgtttgtgacagttaaacttgcagtctggtaggacagggaacaagggaacgggtgagaaggggaagagaggttacctggaaggcttgaaccttgaccctaagcctcaggctcaaaagagtctactcttgctgtctgggtaagaacactggctgctgctgccctggtcattttcccactttcagccacagttttcccaaccatcgggggggtcttgattaagtaggagggctagactcaaaatcccgacgactgctgggtgcagtggctcccgcctgtaatctcggtattttgggaggccggggagagcagatcatttgaggtcaggagttcgaaaccagcctgccctacatggtaaaacctcgtctctactaaaaatacaaaaattagctgggcgtgggactacaggcgcccactaccacgcccagctgatttttttgtgtttttagtagagacggggtttcgccatgttggtcaggctggtttcgcgctcctgacctcagatgatccacctgccttggcctcctaaaagtgctgggattacaggcgtgagccaccgcgcccgacttgtgtgtgtgtgtgtgtgtgtgtgttattggttctaatgtgctgtgactccagactctgaacaccctagggctgggttcctcaacccgtgacactaacacagtgcccaggataattccttgttttagggcacttgctctgtgtattgtaggatgtttagctgcatctctgacttctacctactggatgccagtagcactatcccagcgtaccaaacaaaaccatctccaacccttgccaaacatcccctaggagcaaaacggcccctggtcgagaaccattgctgtagagttcagtgtttccacggttctagggacactatacatcgaagattctagagtttactaaaaacctattttatgaaggttctatgattctgttttttgttttttttttttttttttaagaaacagtctggctgtcacccagactagagtgtgcaatggcaccatctcggctcactgcaacctctgcctcccaggctcaagcgatcttcccacctcagcctcctgagtagctgaaactacaggcacgcactaccatgcctggctaatttttcgtattttttgtagagatggggtctttccatgttgtacaagctggtcttgaactcctgggctcaagcaatccacccacctaagcctcccaaagtgctgggattacaggtgtgagctactgcccctgacctgattccgtatttctaaggcttcagagtttgatgtccaagtttctagaactctagacatctatgagtcaacacttctaagactctttaatgtccaagattttagggtgttatatatctaaactctaaaatttgacagttctagggttctacaattctaggcttctctacctccagaatctgcagattccaaggttctaggattctatacatacaagattctagaatttgatgtttctatgcttctttagctctaggcttctaagattctagaatttgattgttccagtaaattcttgaattggatgtttctaagtttatgtggatctaggcttctgaggttctagaatttttttttttctttttttgagacaagttcttgctctgtcacccaggctggaatgcagtggcacaatcatggctcactgcagcctcaacctcctgggctcaagcaatcctccctcctcagagtcccaagtagctggaaccacagatgcatgctgccatgcctggctaatttttaattttttttgtagagacagggtttcaccatgttgcccaggctggtcttaaactcctaggctcaagtgatccacctaccttggcctcccaaagtgctgagattacatgcatgagccaccacacctggctggattctagaatttgattgttcaaagttctgggagtctagaatttccaggattctaggttacgatggtttcaagcttatatgattctagacgtctaagactctcaaatttgatgtgcctatgtttctattaccctcaaatcccatggttccaaaattctcatgctctgagagtctataacttgggagatctaagatgtgtaatctaaagttctgttgttattttagctgaattctatcattcggaattcttgaatgctatggttctgattctagaattctcaggttctacagttttagaattccatgctaagcacgttatgaatctaggattccaaggttctaaagactgaggttcagctgggcgcggtggctcacacctgtaatcccagcactttgggaggccgaggtaggaggattgcttgagcccaggagttcaagaccagcctgaacaatatagtgataccttctctctacaaatgatttaaaaattagctgggtgtggccaggcgcggtggctcacgcctgtaatcccggcattttgggaggtcgaggcaggtggatcacaaggtcaggagatcgagaccatcctagctaacatggtgaaaccccgtctctactaaaaatacaaaaaaattagccaggcatggtggcgggcgcctgtagtcccagctactcaggaggctgaggcaggagaatgtcctgatcccaggaggcagagtttgcagtgagccgagatcacaccactgcactccagcctgggcgacagagtgagactccgtctcaaaaaaaaaaaaaagaaaagaaaattagctgggtgtggtggcaccacctgtagtcctagctacttgggaggctgaggcaggaggatcacttgaacccaggaggttgaagctgcagtgagccgtgattgcgccactgcactccagcctgggtgatagagtgacaccctgtctccaaaaaacaacaacaacacacacacacacacacacacacacacacacacaactgaggttctaagattccagaattccaaaggtcccagaacactaggattcagggccctccccttctgaggccctggggtcccaaggctcagatccttgtgtcctgccacaagaccaggttggggcgggaaggaggttctgaccctgtctgtcctccccgacaggcccagctaacctttgcattgcaggccctgccggaagaggcccttgaggagtttcttgcaagcctggcaaacggtgggccgtgtatagctgtggatgaggaaggtgtgcggcaccttgaccttggagagcagcatcttgtccagctcaatggggcggcccgtatacgatgaggcagaagaggaggaagaggatgacgggggacggcgaggcaggagttcggtggtgctacggctctgtcgttggcaagaatggaggggacacatcagtgcgttggccccatgcctgggccaagtcacccccctagccaccaacccgtcccatcccccatctcctcaccagctcttcagccgtgcagggcagggactcggaggtgccgaggcgcaccgagtggccactggccagagacgtggatgacaggcgccgtttgcgggccccactacagttgttggggatgctgaaggcacagcgcttgtggtagttcagcccgcagcctgcagggggcgccagagagtaagagacatggcgtctgcccctcctaggtctcttcttgagaagttgtgccctttccacccaatctctcacctggtcctgtcccatcaccccccgccagcacgatctcctccaaaaggcactactatccgtaagtgtatcagccccttcaggcccacccctccttagagttctgccccaagttccagcttgtagccccaccatcaccccatctgtcccccagaccctgaacacacccacaccccttttctcactccaacaagggacacctcaaaggctccccccaaagctctgtccccagtttcagcttgtagccctgccatcaccccatctgtcccccagaccctgaacacgcctcacacccaaaattttcccactccaacaagggatacctcaaaggttccctccaaagctccacccctagttccagcttgtagccccgacatcaccccatctgccccccaggccctgaacgcgcctcacaccccaccttttcccactgcaacaatggatgcctcaaaagtccccgccaaagctctgacccagccccagtcctctatggtaagcacctccttctagtcctccccaaaactcctgtccatctccctagagacacctgttcccccttctaaccctgaccttcctttttctgaggcccctttggttccccctctttccccaaccccaactttccaaaagaaaatgcctctcctcacccccacccctaaggtcactatccctccaggtctgctcaccccctgtaccccactttctcttttctgtagacctggaatccaggcaatccctaagtagtgtgattaaatcttagtagtgtgggccacgcatggtggctcacgcctgtaatcccagcactttgggaggccaaggccggcggatcacttgaggtcaggagtttgagaccacactggccaacatggcaaaaccccatctctactaaaaatacaaaacttagccgggtgtagtggcacacgcctgtaatcccagctactccggaggctgaggcaggagaatcacttgaacccaggaggcagaggttgtagtgagctgagatcacgccactgcactccagcctgggcaatacagcgagactcagtttcaaaaaaaaaaaaagagttctcagttgtactcaggtccattgtaccatactaggcagaagtatgacttcttattgtcttattttattttgtagagacaggatctccctgtacccccggctgaagcacaatggcacaatcatagctcactgcagccttcaactcctgggctcaagtaatcctcctgcctcagcctcctgagtagccagaaccacagacatacactaccatgcccagataatttttttatttttatttttttgtagagatggggtctcgctacattgcccaggctggtcttgaactcctgggctcaagtgatcctcccacctcagcctcccaaagtgttgggattacaggcatgagccactgtgccctgcctattttatcttttaaaatcctcatccatggagaaatcagctcaactccctgtttcccactggacgttctgtatgtgtgctctaatacatctccagtgattccaaacgattccaggatcgctttctattctggagtgaagaatgttcctccagcctttgggagcccttctggtacccgcctgctccaggctttccagttccacacctcctcattgtaggcactgtcttggctgcatgctgtaatcacggaggcaagcttggagaacggtgttggccctgcaagaagagcttcagcagggcaaatggtctttgcacacaggaaccatttcccagtgttggccttgaatcactcatgtgccttccagaatttcagaatcttatctataactctcagaatgagtctcaggatagagttaaactcctgtcggaatgtagtcatttggggttctcttgccaccataggaactgggaccatcatctgtgatgctgcaccagtgaagtctgtgctgataacccattaggacttgatgacaccagggctgtatcatgacaaagactgcatatgctgagacctcaagagttggatatggtgtgtggacgatggcaatatttataagagcttttaatgcactgaatcagtatctgcaggcctagagtccttaaataatacaagtatactttggactgcatgatgatctggaacacaggatattggagaaactggatttcttttttttttttttttttgagacggagtctcaccctgtcacccaggctggagtgcaatggtatgatctcggctcactgcaacctccaccccctcaggttcaaatgattctcctgcctcagcctcccgagtagctgggattataggtacccgccaccacacccagctaatttttctagttttagtagagacagggtttcaccatgttggccaggctggtctctaactcctgacctcatgatccgcccgccttggcctcccaaagtgctgggattacaggtgtgagccaccgtgcctggcccagaatcaggatttctgtacaagcgtggcacccacggagctagagatgctgtctcagacctaatacccaatggaacatccaagaatatggctctaattgcagggcacaccatacaaaaatggaggcgcatggggcccagcgcagtggctcatgtctgtaatcccagcacttggggaggctgaggagggtggattacttgaaaccagcctggccaacatggtgaaaccccgtctactaaaaatacaaaaattagccaggagtggtggtgcgcacctgtaatcccagctatttgggaggctgaagcaggagaattgcttgaacccaggaggtagaggttgcagtgagccaagaccacgccactgcactccatcctgggtgacggagcaagactctgtctcacacacacaaaacaatggagccacagggtctcatcacagaatggatggtcctcacctgtcatctgtcctcatagccaatgcaggtacatggccttcatctgtaggcagagccccgatttcaacattctcactcagaagcatgaataacagggacagaggacctatatagatcttgacacttgggctgaaccttgagacatcttggcttaaagaactgtatgttttggacaggcgcggtggctcatgcctgtaatcccagcactgtgggagggcaaggcgggtggatcatttgaggtcaggagttcaagaccagcctggccaacgtggtgaaaccccgtctctactagaaatacaaaaattagccgggcagtaatggtgtgtgcctgtaatcccagctactcggtaggctgaggcaggagaatcgcttgagcctgggaagtggaggttgtggtgagctgagatcgcgccactgcactccagcctgggtgacagactgagacgctgtctccaaaaaagaaaacctgtatatttttaaactatgatttaaggagatatgtatgggtgctgttatggactaaatgtctgtgtctcccccaaaattcttatgttgaaaccctaacctccaatgcaactatatctggagacggtgcctttatggaggtaattaaggttaattgaggccgaaagagtgtggctgtaatccaatgggactggtgacctttttttttttttttttttttttttttctgagacaatcgtgttctgtcacctaggctggagtgcagtggcatgatcacggctcaccgcagcctcaacctcccaggcccaggtgatcctcccacctcagcctcttgagtagctaggactagaggtatgcaccaccatgcctggccaatttgttgtattttttagagacggggtttcaccatgttgcccatgctggtctcgaactcctggactcaagcgatccaccatcctcccaaagtgctgggattataggcatgagccaccatgcctggccttccttataaagggaagagataccagggatctctctctccgtgtcccatgtgagcgcacagtgaaatgatggccctctgcaaggcaggaaagcaggctacaccagaaacagaaccctgccagaatctggatctttgtctttccagcctctcacaattccagggattttgagaagtaaatgtctgtcatttaagccacgcagggtggtattttgttaaggcagccctgacaaactaagacaggtgccaggttgacaagagatggaccctgatagtcatgttaatgtgtcagcttggctaggcgagatccacagttattcagacactaatctagatgttgccatgaaggttggtttgtttgtggtttttttttttttttttttttttgagacggagtctcgctctgttgccaggctggagtgcagtggcacgatctcggctcactgcaacctctgtctcctgggttcaagtgattctcctacctcagcctcccaagtagctgggactataggcacatgccaccacgcccgctaatttttgtatttttaggagagatggggtttcaccatgttggccagggtggtctcaatctcttgacctcatgatccgcctgcctcagcctccaaagtgctggggttacaggtgtgaaccactgtgcccagtcaaggtttgttttttcttttcaccttctcaacccagcttttccccgactccaggaagaactgggaagagaaggccccatggaggtattttcttttcttttcatttttttgagacagagttttgctcttgttgcccaggctggagtgtaatggtgcaatctcagctcactgcaagctctgcctcccgggttcaagagattctcctgactgagcctcccgagtagctggaattacaggcgtccaccaacacgccggcttttttgtatttttagtagagacggggtttcaccatgttggacaggctggtctcgaactcctgacctcaggtgattcacctgcctcggcctcccagagtgctgggattacaggcgtgagccaccgcacccggcccagtggaggtattttctggatgtgatgaaaatccataatcagctgactgtaagtgggagaggtgatcctgcttgttctaggtgggtctcattcaatcagctgaatgttttaaaaagcagatcagagacttttcggatgaagaaattccacctgtggacatcagcttcagcttgtgcctgagttcccacttgcccttcctgataggatggatttttttttctttttctttttattgttttgtttttgtttctgttttcagaaggagtctcactctatcaccaggctggagtgcagtggcacaatctcggctcactgcaacctcctcctctcaggtccaagcaattctcctgcctcagcctcccaagtagctgggactacaggcgtgtgccaccacgtccggctaattttttgtatttttagtagagacggggtttcaccatgttagccaggagggtctcaatctcctgacctcgtgatccacccgcctcggcctcccaaagtgctgggattacaggcatgagccaccgtgtccggcctttttcctgtttttgagccagggtctcgctctgtcacccaggctggtgtgcagtggtgcaatcagggctcactacagtgtcgagctcccaggctcaagtgatcctcccgcctcagcctcccaagtggctgggaccacaagtgtctgtcaccatgcttggctaattattttttgtacaggcagagtcttgctatgttgcccaggctggtcttgaactcctggcctcaagtgatccacctacctttgcctcccaaagtgctgggattactggcctcccccactgtgcccagccagatttgagttgcctagccagcccacacaattctgtaagctgattccttgcatataaatatctcaatatatatctcctcctggatgtttctctgcttgatccctaactgatagaggccccaccctcttcccccgccacccttctgctcccctaggctctgttcttaagcccctacttgtccctcccagctccacctcctaggctccgcccctagacctgagccccggcccagccccaccactccttccccaagctctgcttctgggcccatccttcttcccattattacttcctaggctgcgcccccagctctgagacccgctcctcctccccacgctgtccccgtgccaggaccattacgctccgcccccggtgcagagccccgccccaggccccgcccccaaccctttagctctcaccatcgcacttgaggccctggcgcactaggccgaagagcatctccccgcagtgatcacagaaggcaggcgcccgataggagtgcaccgtgagggcgtgcgggcggatctggaagtcctcgaaggtggccgaggctgtaggcggaaaataggggtggatgcttgaggcggggtaggccaaagcttttccagaccccacgttccctgatttctcacagtgctcccagccgcaaggtgtgatctttccttccttccttcatttgctctcatactacattctgcctgggttcaaatcccagctccacccctgaacaaaacacatatatccctacgccctgggcagggacagagcgggaattggggagttgtttaacgggcaaggagcttcagtttcgcaagatgacaacagttctggagaccggctgcacaacagtgtgcgtgaactttaaattactgaactgtacgcttaaaagtgcttaaaatgttgtgggcttttttgtttgtgtttgttagagagtttcactctgtcacccaggctggagtacagtagtgagatctcggctcaccacaagtccgcctcccgggttcaagcagttctcctgcctcagcctccagagtagctgggattacaggcatgcgccaccacacccgactaatttttgtatttttagtagagacggagtttcaccatgttggccaggatggtctcaaactcccgacctcaggtgatctgcccgcctcggtctctcaaagtgttgggattacaggcgtgagccactgcacccggcctaaaatagtaatttttatgttatgtatattttaccaaattaaaaaatttttaattaaaaataccaccaccaacaacaaaaaagaacatggataggcggtgcccggtggctcacatctgtaatcccagcactttgggaggcccaggtgggcggatcacttgaggtcagaagttcgaaaccagcctggccaacatgatgaaaccccgtctctactaaaaatacaaaaattagccaggcctggtgccgcgtgcctgtaatcccagctactcaggaggctgaggcaggagaattgcttgaacccgggaggcagaggttgccgtgagccaagatcatgccacggcactccagcctgggtgacagagtaagattctgtctaaaaaaaagaaaaaaaaaaaaagcccagtgtggtggtgcatgcctgtaatgcctatagtccagccacctcaggaggctgaggcgggatgattgcttcagtctgggaggtagaggctgcagtgagtggtggtcatgccactgcattccagcctgggtgacagaacaagaccctgcctcaaaacaaaataacagggccgggagcggtggctcacacctgtaatcgcagcactttgggaggctgaggtgggcagatcacttaagatcagcagttcgagaccagcctggccaacaaggtgaaatcccgtctctactaaaaatacaaaaattagccacgtgtggtagcaggcgcctgtaatcccagctactcgggaggctgaggcaggagaatcgcttgaacccaggaggcagaggttgcagcaagctgagtttgcgccactgcactccagcctgggtgacagagcgagactccgtctaaaaaaacaaaaaataataaaaatgacaaaaacaaaacaaaactcaggtttaggggagagacaacaatgaagataaaaattcaagtgaggccagcttatgatatgaaagagtacttaaagcctgaacaaggtcactaaaggtgtaaatccagacttctgtcattcattcattgagccggtttcactgggcactgcagtatgccggagcagcagggaaggcagccatgaaaaaggcagctgcccccaccctcaagagggaccaagggccatagactgctctaaggtgctgagagcatgcccatctatactactggaatagtgagtggatgaactggcttctggctgtgtcttagaaaatcacctgggggcttttaaaaatactgatgtgcagattccatctcactttgcagagattctgatttaatttagcattttcgtggcaggagccatggacatcataacttttttttttctttttctactttttttcttttttagagatagggtctctctctgttgcccaggctggagtgcagtgacatgatcgtggctcactgcagcctcaaactcctaagctcaagaaatcctcccacctcagcctcccaagtagctgagactacagacgtgtgccacctcgcccggttaacttttttttttttttttttttttaagagatggggtctccttatgttgcccaggctggtctcaaactcctgggctccagcgatcctcccacctcagcctcccaaactgctgggattacaggtgtgagccactgcagctggcccattttttacctttatatttaagcataacacagtcagttacagatccaactccttcttctcctcttttcccccttctaactactgcacttgactagttttataaataaataagtataacatatgttcaggaaaggccgcacatcacaagtgcacagctcaatgaattttcaaactgtacaaagcgtgtcactagcatcctaatccataaatgaaagtttagaccagtccctaaagagcgccttcatgaccccactctgtaaccatcttccagaagcccccaactctccttatttttttttttcagagggagagaaaggggtagagatggaatctcactatgttgcccaggctgatctcgaactcctgggctcaagcgatccccccagctccagctcagcctcccaaagtgctgggatcacaggcgtgagccactacacccggcctctcctgacttctaactccccctaccctctcctcccccagatgccccgcccccacccgaggccccgcccccaggccggccaccacctctcacccgacagcaccacctccaccaggtcgccctcctggatgtctccggacgagcgcaccagctgcaggaggttggccgacgtggggtcatgtttgaaaagcaggatcttgtcgtaaaggccgtagaagccacactcagggaactgaggggcgggagagggatgtggcgacggaaaagctcagagccgccttcagcagcgggcggactgtgaccctcccagggcagggccggctgtttcccccggaaacgcagagaccccgcaggccctcgcttcctgcctgccccctcccaaccccagcgcgagccgggcaggatgccagcgccccaattgtacggggagggggcgccggcgtgggtttggtggctggaagggggagctggggtgggagggagagtggctccgggagcgtggacacctcgaattttccggaacctggcggaggtgggaggggatgctgaatgaacactccctcccctgtgcctcctccccaggctcacacacccgccccccagcttccttcctggatctgtctattgttgtcccagttacctggctccaggcccagcactggggtggggcgagctggaaggaggacttttcggggctcctgggaaagtgggggggggggccgggggacttggactcgagggcgctggagataaggagggcgcctgccacccaatgctcaaaggacccaggtgtctgggtcctcagctttgggggcctgggggcaggaaatgaaacctagtagaacagaaagtgaaactgccccggtggggcctcgggaaggaaggtaagcggccctaacacacctggacctggcagaaaaataaaactggggtgaagcctgagcggggcaggctggggacttgagcactggacaaagaagttcacccaagggacaatctgcccccgtacccccactgccaccagcttcccatgaagtgggctgagttggggtggtgagctgggcctgcgggattgaggcatttggtgggcaaaaccctatcagttctcactgctaagagagagtccacagaagaccaggactgccttggccctgaccccttgggaagtttttctctaagcttcagtttccttgtctgtagaatgggggagctggcccagttccccacgtttctctgatgcccaaaggattcatttccaggagtctgaaaagattctggaatttggatattttgggactccaacatgctcacattatagaattatacattctagattcctacctggtatcactatacattttaggatttcaataacctaaataagcggtaatctaatattttaatattctaggagtctgacaagctaggactgtgctctttgaattctttagcattcaaggacctcatccatccagcattctaaaattctaacattttaactttctaggattcaacaatctaggaatctaatattccagcattttaatgttttactatttcacaaacctagaattctaatatttgaacacgaacatgggggcaatttaattgcctaggatgcatattccaacaagttatgattctaatattctaacatttctacagtccagtactccaacacagaagcccactattcttttaacatttcacggtttagacgtggagttccacctggtttcctcttgccataacacccagctgcccaccctggggaccctggtgtccaaaattaagagtaggctaacagcactgtgactaggaaagggaatagagtccccagggtctgtaggagtgcctgcccctccacacatatctcaggcttaggggagggcagaattgggctccgagacctcacttgcccctggcagctaactcaagcacctgcacccacacatgtcaccggatcaccatggccagcccgggttcaatttctcctgtttccaccaaatgggaggcccgggatgggcctggacgtggaggtccgccgacatctgctgccccttcctcccctctctacacctggctggcccctcccttcctccctgtttgctgcagaaaacaacgacatgcagggacatgaaatttggggaggcctctggggcaccccacccctgcccagtcctctctcaaagggatggtggggagaggggcaatggaggggggcaatgccccctatccctccatcacccaaagctcaggtctccttcctccctcttccgcacaccaggccccagacccctctgccagcgccccctccttcaacctctccccgagctggatccagggagcctgcgccctcaccttctggtccacgatggaacaggccagctgcttcacatgagccagctcggaggcggcgggcaacagcacgaactcgcgggtcagcccgatctggatgtgaaaggagaccccggaacccggggccgggatctggggcagtagcggtggcggcgactgcagctctaggccgccggggggcggaggagaccccggcccgggagagccagggagcccggcgggataagagggggcggtggccatggggggaggccggggaccggccgcctggagcccacccgggacccggccggggggccccgggggaccctgggttctagatccgcgggatctcgtgagcaggtggtgggagagcggggatccgagaaaagatctggcaggcggaggggacctgaggatggcggggtcctgggaaggagagaaaggcactatagtgggtcagaggcccggaatccagggctcccagaagatcagaaaggagaaaagtagtgggttggaggtcccagcgattgagattccaagaagcctgagaggaaatctagtaggtcggggtcacagggatcaggagagcccgcgattcaaaggccccttccctagaggagggattgagaagggggcagagggaatcccaggatccagtgctccaagaagaggatcccactcagaaggcggcccgggggaattcaccttgggggtggagggcaggagtctctgagtcggggaccgagtggattccagagataaaggggttcgcagggacccgaccggccaggggatgggcagaggggtcccgagggccggagtgggtagaagggaatctcacgagtcgcagaagttggagaaaagttcggtcgggagccgtgaggaagggggcgttgccggagcggggttgggtggggggcagggagggtcgccaggcgccagtagctctttttccccctccaaagtttaagtcggcggcggcggcggcggcccaggaggaagtgtccggagcgacagtgcagtcgaccaatcggcgcgggcctcggcgacgtcagagaggggcggagcctgccgaggggccgggggcggaaggggagggtgggcccggggcctccgagttgggggctggacctccgcctccagggtccgggacaagggatggtgtgagggatggagggcaggcaggcgagaccagttccttccctgaacacagccaagcctggaaagttaacttttccctcggctggacagggaggggaaacactatcacccaccgccggtcgcaggcgtcgggcttggaggccactggccctttaaggaggggagccctctccggcaggcgtccggcgcccatggcaggggacgggtgggaaatcggtatcaggtcccggcccgctctctgggttcggcctctctgttctccgagcgtcacccctgccctccccgccgcgtcccagcccagggaagggggtgctgcagagcgtcccccggccccagcccatttaacacatggaaagaccgaggcctccagatgggtaggaaggggctcgccttaggtctgtctccagcgatggtgggcaaggtgcatggcgctaactggatgggtggggagggtccatccccccgcccaccccaaccccgccttaggatagtgtggggctgccccgagggaggacagcacacccataccacttcatagatgcagagtgtgtctcctggggatgtggagtacgtgtgcgtgtctttctctccatgtgactttgggtgagtggcttctctgtgagcctcagtccctccatctgttgggactgtaataggactgaccccacatgggatggtgggagccgatgccatggtatactggtgcctggaaacgcagcagttcagtaagaggtggttgtctctgataatacgcggaaaggggtggccacctccagcactcaggctttgatgggtgggcacacccattcagtcacccagcaagtatctgtgaggacctactgggtgctgggtgggccctgctgtaaaactccagccgctacaggggtcaggcttgatctctcctccccagctaataatcaaatagtggctaccatttagtttacacagaataagctgaagcctcagagaagcaaaacgtcttgcccaagatcccagagtgaagttgcttgagggaagctgccccacccacccctttgattgacaagtcaaggcctaggtttgagctctaagagaagggccacctgtctggctgggatgctggcaggactggaaatggcagggctggctgaggatgggggctgccagaagagcccctcttcctggtgtacggccgttgggggtagctgaggtcggtacagtatcgattctgtcaccacatccgggggctggggctgaggaaggaagtctgaggctggagtgaaaacccaaaccaccacctggggaactgcattgagcccagagggatgggcagggagcacaccacgtggagcccacgaaggctccccttggcgtcatctaagggcctcctgcccacctgcaccctttttcctgaagggcagatgactgtcccagcaaaacgctgccatgtcctgagtgtccagacagcggcctccatcctttctcgtatgttcactggggcctgctgggggactggggcacagccctttacaacccaggaactgggcattagtgccctgtggcagaggtgctaggattaccgaggacgcctggctggtaggtggtggaagcctcctcgagacaggagcagcggtcccctccgtctcatctggagcatgtggacacctgctccctctttttaaggctgtggacccagtgaaatgccatgtaaagcactcagtacagtagacgtggaccactgagaagggaaaggagggacgcatcaggacatgagccacgagggctcgggcacctgcggcacctcctcccagcatggaggagcctgcgccccaaagccatcatcctccactggcaggtgcagccttttccctccctgctccttgtgggcctgggatgggaacaggaagggggtttacgtcctctgggcaccagccctttggcctcgccaccaccctcacacatcccaggcggggctgaggcttcagctggactgtcatcatagtatctgctccccagggctctacccctggggagggagcacttagggacagaaagggcacaaggagattcggtccagtgcctccacttctctccacccacaccccacccaagctctgggcccgtctccggcccctgctgccctaccacaaaaccccaacccatcatatcccctctctccaaactccacccaacccaggcagagccggtcactcctcccccaaagtccccagtgccctcaacagatggcaccgtcacccatcttactccaaagggtttattgagacaagttttcacatacaagatggggacagaggggttggggcttataaacaggaacctggaaggggaccgagggtgcagggtagaaccaaacaagagagtgaaataaatagagggaaagagtggagacagggaggagactgactgagaccatcacacagtgataatgcgggtggggcggcgccatgaaaatcccgttatttatacagatatacagggagttcagggggacccgaggcccactccaccctccatgccccagggaggggcacaagaaagccgtctctacccatgggcgaccccatggggcgctgggagggctgccctaggagtgttgggcaatccctggcctggaagccttggttagtgtctggaaagcagtggagagggccggaggggaggggcagccaggccggggctcagctctgaggctcccggctgccaccctttctcccagcacagctcctgcccaggtctgggaggatgggggatgggggagcaggagctcaaggggagaacctggcaccttctggagtcttggaaaaactgatccctaaagacacccggccctggctgtgctgccctctggaaagcagctctgataccaggagcggctgtcagggcacagggggaaaccccgaggccatcctcgggggtgattcctgaaaggggcccatccccaggctggatgcttggggaaggcagccgttggggagggattcctggggaaagggccgttagcaccaccaggctccatggcaaacagacagaggccaggcctctgcacctccagcgaggctgggagtcccctgcgggaaagagaagggaggggagactgagccgccgcctctagggcgcctctaaggcctcaacccctcccctgcatgcccagggctcccccagtgattctcacaggacgcccctgactggactgcggggctcagcacacctggcagtactaggcatgggcgtgcagagactcagaatgcggggtttctgccctcacctcagccccacctgcccggccctacaccccagccagcgtggcggccagggcagggccaggtgggcatcatacgaagaccttggccagggcatcagcgccagcactggcaatgagggccttgctggggtggcaggcaacagcgtggatggcctcctcgtgcttcttgcggtgggccgtgatctcctgcacgcacgttttgttgtccaggctccagagacgcagggagcagtcatggcctgcacatgtgtcggggacagaaggggtggtcactgggctcctcgctcagacgcagccctggaacccctcacctggccttgtccaaaggcctcaggggaagtggggctcaactctcctctctcaccctctgctcatcacctcctgtggcccgcccaaaggagaaccctggtcccctcctgtccacagtccatctcatcccccagcatttcttgagcagctactgcacactgagccccagggcggcaggggcagtgaacaaaacaggcaactctccctgccccgcagcactgacgctgcagctgggcaacaggaagagaaagaagaaagcaacccagccggtcagtgtgaggacagaatggccccaggaggaatgcagggagccttccaggcagaaggacaggcgggaaaggtcctgaggcaggaggtgggggtggccacaagagccttagcagggacttggggagaagaggggagaggacggcaggctgggcagggccctggcgaggagaagtttaatttagggtcaagaggatcaggcagggcaaaggctcagctccctccactgtctagtggcccccagaatagagccctgtctgggcactgggctggagctcactgaccagcccctcacccaccagaggctgccagcacaggcccggaggcagagcccagccacagcctccaacaccacggcctgcgcctctgtgcacacacactcactgctgcactcactgcaggcctcacccttcacccccacagcgacctccagtctccttctccacccacccacgtcacactccatcccttctaagcacagccacgttgctggcctcaatgcccttatccagagacaacagggtgggagcacagaagtcccacgggtacccccaggtagacctggactgatgttacagagcttcaatggccaagttacaaagcgtctgggcatcagggcccacatctgtaaactggggatcaaagtaccaaccgcacaggctgcttagaggccgaatgagacgatgcagctccagtgacccagaggagggccccagcggactgtgctgccccctatggtcaccacggtcattcccgcccagaccagcctcccccagccctggcccccggggccccctgagcacttgcctggagccagtgcccaggcctcttcctccccttctccccaaccctggtgggactagtgtgctcaacttacttcctgacatcaggaatgcgccgttggggtccacggctaggcaggtgactgcgtccaggtgtgcaaccatggagtgcaccggcttacctgaggcgagaagggcgggtggcaggttcccctcccactctgggcctcgcctgagagagtgaaaggactggacgagagactcccagagcctcccacagggacgcaagcatctctgctgcctgcctctggccctccccacccactacgagcacaaggggctaggcctcacctgtccgattgtccaggaagcggatgcccctgtcgtcgtgggcggtgatggtgagaggctggtttggatgactcaccacttggttgatctgggttggacctgaaggaaaacgcaggaagagggaaggatgtcaagcagaaaatcaggaagaccagaacagaggcacaagcgcagcgtgacagcccctacaccagcctctgcctggatgtcgaggggggctgggcgagggcactccggtccccgaccgcagcgctggttctgcacaagcagcccctgggccctgttttggggcgggggaagaggaataacaaacatgaacacattccgccactctaccaagagggcccgacggggcggccctgacgcgctctccccactcagccccgccagtgccctggctgtgagggccgggggccctccactgggacccaacttccttcctgctcagggcctgagggtgcaggggagtcatctgagctgactgacaaggggtcgccaaagccccaggaggaagtggggcccagaagacactgagaccaattccatgagctgatgtcagcccccttaccgctgctgccccgggactccagcgtgaggagggcactgccaacctccatgtcatacaagacggtgtcgccagagcggaaggaggccacgatgtgggcaggctcggtgctggtgaaggccactgaggtggggaccccgtgctctgagggcacagggaagagaaggctgctgaatggaccctcagacccagccctgccccagggtgggggacagtgggtgggaggcctggggcctcagcaggaaccactctgatagcctccagatcccgcacagctccagggtgaggcaccggggcccccactcaccgctggctgtggggaaggtgcagaggcaggccgggctgctgctgctggggtcccagatgcggacggtgccatcagcagaacaggaggccaggcgctgggaggtgggactgaaggccaggccccacacggcgtccccgtggccctccaggacgtggctcagcacgcttgggtctgcacccaccgcagggaggaaatgggctgtgtcagggctgccagctcctccctggacagcccagagccccagctctgccaagccccaggcagctgggctccaatcacccacgcacccacttcacacctggtgcccctcggaactgtccactgccaggacagcccggcagctgctcacactgcccactagctctccaaggaaggttctagggctccagaaggcagggatttccctctattcacagctgtctccccaagcagggcccagaaactgggagctcaatacagaatttttcgggctccattaaggaagaaggaacagcatggttctgtggccccaggagcggcacgcagcctgtgctggacaagggttggtcccaaccctggcccgagcagtcttttcagcccatggccaagtgcatgggctttgcctggtctctccaaagccccctggtcattcagaggtccaatcactgcttccctggttgctggagtccacaccagcagctctggcctgctgacaccgaaagtgtggtggctaatgtagctgggaccgatcctgaccttgtgcaggtgagcctgttctctaaagtctgtcctccccttgagaggagacaaagacctctgaactctgcccagacaaggtggagcacagggccaggtgcatgatcaaggaggcagagccgggcgcagtggctcatgcctgcaatcccagcactttgggaggccaaggtgggtggatcacctgaggtccggagttcaagaccagcctggtcaacgtggtgcaaccctgtctctaccaaaaatacaaaaaatagctggatatggtggtgcgtgcctgtaatcccagctactcgggaggctgaggcacgagaatcacttgaacccaggaggtagaggttgcagtaagccaagatcacgccactgcattccagcctgggtgacagagtgagactctttgtctcaaaaaaaaaaaaaaaaaaaaaaaaaaggcagagaacagggggacagatgttgaacagaagtgacagtctggtcacttccctacttaggtcttagatgctccaaagagaaagccccaacgcgctccagcctggcccagctaactccaccttctctgctttctctggacatgccctcccctcaaccacgcagagaccctggcggatccccacacacagagtacacggcatggcagagcagaggctgccagggccagccacgcctgtgcatgggctgctcccagcctgggctgcctcagcactgccttctggacgccggctcacagagattctcaggcagcttcaccacctcctcccacagccatcattcccatcccggctggctcgtcccttggccacgcgctgcatcgcgctgctcacaacagagcagacaggggagccgtcacacgcactcctgaggcctgcagtgttggcaagaggtggacgcgacgtgtgtgtgcgtggaggggacggccaggccccagtggatgtgaggggaaggcgggaggcgttgtcctcaccgtagccatcatagggatccatgctgaggtctggaatcttccaactatggatgcaggcatctgccccgccactgtagcagtattcactgttgctgcccatagccacagccaacactgggcccctggaagggacaaatatgtggaaagggggatgagacaagctcagggcctcccctggccacaggacctaagttccctactagcattcttcaaggatggccaaaaggaattcagtgactggggctctggccatgctacctggacaagctgcctgtcccctgccctcccccaccccacctccatctcctcccctgaagggctgtgctgagtaccagctgccagggcatgtgaaagtcagcatggagccccaagaaccagggctgtgtatatcatgaagggggcggggactcagagccccctgctgtcctgcctcctgccgtgggcctcccgcgatggcagtgagcaggtcaggagtcaggctgcatttaggacgagtttctagcaggctcaggggcacctccctacctgtgagcccggaaagcatgtataggttccacatctagcgccgcattcctgtgggatgacagaggagcctgatgtcactgagaccctgtcacccccgtccccagatgcccctgcccccggctctgagcttgctgccctcacttcttggccgtgaccgccttctgcaggttccagagcttgagcgtgccgtcctcggaggcggtgagcagagccgactggctgtggtggaaggccagggaacgaatgccgtcgtagtgcgagcgcagggtgaacttggggttccacgtcttcttaaaagcatctttgctgtcagacagctggggttggggggagctgcctcagtgtcttcgcatccatcccagcagtcatgcagacaccgacacccagggcttgagggcccctgtcttccacccacatgaccctggcaggaatgccctcagagcctgggctccagccgggaactctccccttcctctgctgggcagagtctccatgctcgcccaacaagtccccacactgcgctgggttctggagagacaaaggtgagcctgaccccttggggtcttgcagttgagaggaaggggaatgggggacacaactggaccatcccacaagtgtgcaggatcatcagccatgagcagggcaatgaattaaagatgcacagagagacatcaggcagcctgccctcctccctgggggccactgaggctttcctgaggaagcacgagccagcaggacttcacaagataaggagagggccctggagagggaaagggcccgtgcagaggccctgaggcagcaagggcgagcccaggcctgagaggtcagtggtacaggctgcaggaggcaaggagagtggcaggggatgagacaggtgctgggtggtgagccccggaggaatgcgcatttcatcctaagaaaaagcctcagagaaacaaggagccggggaagtgtttagagcaggggaacgacatggcttgttcctgccacccctgagaggctcagattaggggcaggtaaaagtagccacagacggggcacagtggctcacgcctgtaatcccagaactttgggaggccaaggcagaacgatcatttgaccccaggagttcgagaccagcctgggtaacatagggagatcccctcaaggagcaaaaaaaaaaaaaaaaggtagcctcagagaaagaggttgagaggccaggaagtcccaggggagatgagggcatggagaccagacacgtgaccatgaaggggaggcagtgcacaagtgggagagctgtgggggcctctgtccaccacgctgcatgcgccctggtgccgctcacccagcaggggacccggagagggccaggttccggagagatgacgagcagagtaccaggcaagcctcagcaccatgccccaagatgggctcccagctgacgtccctgccttagctgtcccttctgccacagttctttagggtcagaggatctgctactgtgtggttcactcaccccctcccctagcggggctcagaacactgcacttccccaagatgaaatgacatcttggggcgtgcagagggaccccatggcacactccacttctcaggcctctgctctgaccccccttcctgaatctcacagcagtccccacccagccttactagggtcaccaacactggaaatcccattctgtcacagtaaaatgtgcacatacacccacaccaaaagctcccagctggccaaaggctcccagctggccaaaggctcccagatggccagaggcccgtccactgaggcccggaacatttcatttcagcccagctgcccattcacactagattggcctgacttggcagagcagggggtggctacaggtcatcttcctgcattccaaatcaccagggtgggaggggcagagtggaggagccgtggaactgtgattaaaacacaggctccagagtcttccaggccctgcgccttggcgaccgcagtcaagtccctccactgtctacatctgcacccctctgtgaaacaggatgagcagggcacgggcggcacccagtcagagcttgcaggggctggccctgggcgcaatgccaatggggacagtgtggggggcacccggagaacttacatcgcagctgaggtcgttgtcgttggtgacggtgagatctgccaagtcccccaggctcacctccccgcccccgatagtgtccatgatgaagacgtctgaggagaagccaaaggaacctggtagggggaggggagggaggggcagagagggccagggagagagagaatgacagagagaggcagagaaagagataaagagcaagagagagagacggggagaggacaagatgaagaatcacagctggaaagagacagagagacagacagggcaggacagacaaaaagagagggagacagacagacagacgaacttttggggcagggaggctgcagactggaggctgggcctcgaccctgaagacacagaagccctgggctcagctctgcagcctccctctgccatgggcccgcaggactgggaccaggtggggggtgcctcttaccttcatgtggccggggctggggtgtgccaggaggcgggccagtcacttttgggggcagcccatccacatcccgcaggtcagccagaatgccttggagtttgacccgacggctttctgcagggtcgaggcatagggccggagtcacccagcagttccaacccagtctggcataggtgacgccttccccacactgagggccccctgccactctgtggggctgtgaagctctggccctgggggagggggggaatgggcagaggagaggaggttgattgggcccctccgtggggcagtgggcaggtcactgccttgcctaggcctcaggccccagccacccatcccacgtatcctgagagccctcctagctaggagtcacaggacagggaggaagatgcggccctcccacctgcctctccccgactgggtcctcatcctgttccctccttgaggccagccagagctggacgcccgccctggagggctggcggccccacttcaggaagagccaggactgcctgcgtctccatggggattttccagggaaggggtgaggggccggcggccatgacctgggcctcctgctctccttggctaccctcctctcaggaaacatatccgtccggtagagagaccctgtacaggaagcagctgcgggcagctgagcctgctcccaccccctcggtggggaaggcaagcgggggctggccagaaaacgtcagctcacccagctcatgggggctcccatccacagtgcaccgccgagggtctggagccccttccccatcctctcctgagcccaggaaatcaaactcattgatagcatcctcagagtcgtcttcctcatcctcgtcttccatttcgggcaccagagccttggatgggagctggcacatggagaaagccagacaagtcagggggcctcttgtccagagactaagccacctccgtgcctaggaacaggtaagccggggctctgggcccgtttctgttcatggggctgcctcagccgccagccagctgccctggagcgccccctgctgggccttggacagctgctaccactagggccggtcggcctgaccccaccctcacgcagtccttcccctagccagggctcagcctgctccagtcccccagcaaggtgcctcggatgaagaaaagtcagataatgcaacaatctgcctgcagggagggcagatatgcactggtgtccgtgtgtgaatatacggaggtgcaaacaagtgaggatgaatggaccacagcattgcagcgataaacacagcaccagcagccgtgctggcacaagagcaaattccactcactgaatgaccactgactacccctcgcagacacgacttcacttaacccccaaccctgcgaacagctaccgtgaacactgtcattatcattcccacattacaggccaggagacaggctgagcagcaggaacccacttgccctaggtcaccaaggccaagctctgcccactgtgaactcctccagggcgtggctgaccccttccacatgtcagccccccaggctgagtttggcgacacctctcgggcaccagtgaggggccagcctctgacctgcatgggggggaccagagggaaggggcatggagaagacctagggccaaggtttattcaacacttgtgcaaagaatggggaaggggagggtttagacagcatgcccagaaaggcagcggccgggctcaggactccagaggagagaaccaccacaggtgctctgaggggcacacgagtggcaattgtgctctgccaacagtgcctggaaccatgagggctccaccactaccaagtgccaccagcgccactaacacctactgagcacttgggggacagccaccatgcagctgagggcttcctgggcaccagctcattctaattaaatcctcaacaactcagacggagggactcagccccatctaaagggtgaggagactgaagccaagacaaagaagtgtgggccagaactcacgcagctgggccagggccccctgggagccatgggcagtcccctgggttcccagctgggcctcgatggagggctgctgcgtagagacagagagccctacccaaccagccagcccaagggtgtgggcccgaaggggtgcaaacaccacggatgattcctgatggaatgggtggaggggtggaaaaggactagaaattctcagaggggtgggaaggaccaagcgtctggaccaggggccagcatttgagaccctggactcagccctcctgctcttcctctaggcctcctgcagtgctgcggctccgtgcacaccactctacttggggtgcgactctgtgctgagccacactggggatactggagatgcagtggaggcccacacaggcccagtccctcccagggagaggtcaggaggaatacagaccagacagggaggaccccagagtggccagggccagggaagggagcccagggtgagtcagagaaggcttcctggaggagggggtgtctgagctgagtctaaaggaggaaagaaaggggacctaggcaaagggacccgctaatgggaagcccggggctcagggaaagctccgaggccatctgccacaggtgcctccttcataggcacatgcccctgcctccaccacaacgcgtccttctgcacatgactatttacaaggccgctgctggccacaagctcctccaggccagggcctgtgtgtctccatatccctgctgccagcacacaccgcagcccctgaaggcccaggctgactcggaagggcttcgatcaggtcacacccaggccaggctgtgcagggcatggaggaagggctcaccttcacacgctgcttcttgtgctgcacgctgtccagctcatcgtcctcgtcgctgtcttcgtcctcgcagttctgcaggaaggggatctgccccagcactgagccgcccaagcgctctttgccatctttgcctgccgcgttcctgccaaagacagcagagcagaggaggcatgagtcctggcaggtgtcaaagctcagataggaaggtgccctcccaggcttggtggccagagcccagacccagctaaccccctaacccctgagcagccttgactctggtcacacacagagccccaaccccagcctctgcccaacaaatgctcattccaactggaagcctcactcagaccgcaaacggggcccagctcctcaatgaccgccgacctgagtttcagagggccagcccccaaccctggtcacaaatctccatcctgtgctgagtcagaaggaaagctggatgagaaagtgccactgactcagcagtccccattcccacagcccagtcagaccacaagggcaggtcaggcaggaggcaaacacgccctgcaggaaagaggaaccggccattctacaaatgctctgggaggcgccgaaagccagccagcctcgcgcaagcaggggcgccggcgatccctgctacccaggagcctgcactatccccagcaacagatggcactcctccttccacctcctggcttccaacttcatgacaagttatagcagaggaggtactgacccagcctgactgcgggagaaggcagggtgcaattccaagtgcagatcgacgaaaacgtcccccctttctgccatcaggttgatgccctggaggtcttgtcaactgccagttaccaacgggtgcagaggtcactgcagatgtaccctctcgcctcacggctgccatcaccagagctccactccatcctcagaacactcgctgcacttgcagcgggacacaggactccattctcaccggccttcctcccacaacgacactgacacgccgcacaggctcagcctctttctcagcttcctcctcctgttcctccctccagcctctaagtgggagagcacccgggcagtccccagatctcttctctgcgtcatctacactcactcctgcaggcactgcagacggccatggctttccaaagaatgcccatgtgcttgttcaactagacctatgtttaggggccaaatgccccgcagctccagacgagctctgcttctccacatgggggtaaacaggcccctcacacttcacacaacctcggcggcccccagaacttccactcccaggcttccccgtctcaggggatgctgctccaatggctcacaccaaaccctggagtcgctcgtttcttttcctctccccttagctgcagtccttcagtgtcgactgcctgaaagcctctggggaagctgacacctctcgcctcaccaccgctaaagtccatcagctctgtcccagacatcgagccatctcctaactggtccgcctgcctcctctgtgaccctcccacacctctccttctcagagtggatcaggtacgtcagattatgtcaccccgctgctcgaaagcactggcttcccacaaccctgagtcaaactcagactctatcccagcccaaggccctgagtggctgactcctgagaccacaacctccccgcagcccacgcctcactgcctgcggccatgccggcctcgtgctgcttctgtgcaggctgcgtctctcctgcctctggacctcggggttcactgtgccctctgcctagaacattctcctcccagccactcgtgtggcttaccctccatttaatgcccacagaggccctccctgcccaccccctgcagaggagcacatattggccctcgtggtctccatcgtgcttagcatcacctacgtggcctcacttgttctgcttaactgacaattgctgatgagagtgaacaagccagagattcctgagggtggcgaccacgtgtgctccactccctgctggcgaggcacccagggtgtgccttcggtaagcaccccactcgaccgagaagcgggcaggcctgagtatcaggacgggggcagggctggagatgaggccatggcgaagtgtgtggagggaacccaggacagaatccgggggatcccagcagtgaagggactcagggtttcagaacaagggagcccacggcatactccaggaggaggggccgccagggcacccagcgccatcagctgacactctgaccctggccttcaccagcagtcaggaggaacagagagacacacctgccatgtccacgggctcacctctttatctgctcctcgatctgtttcaccagcagcgactccccaccactgagccctgcagggcctggtggagccctgggggccccttcactcggctccactgccccgttgagctccagcgagcggcccagcagggaacggacgcgcttggaccgcatgtcgaggatggtgtctgtgtagcccacctcttccaggtacctgcaggggtgcagagccacgtgggtcagacatcccctgggcttcttcatgtaccacaggggccaatgcaaaccgagacaacctcttaaggggccacttaagagcatacaccaaaatctgacataagcacaccctcgctccagcagttccccgtcaaggctatttccagtggaagcccttgtacacacacacaatgctatgtgtgagggtgctccctgcactgctgtatggggaagccgaagcacagggaccagcctcagcacccaccgacaggggctgtgtcagcaaatgactcatagcgctgcaaggcagaagatcaacagggcagagccttaagggaagctggccacggtaaacagcagaacgaaaacgctaagttctatgatccacatgatgccaatgtttgtagaaaaaaacaaaaaggcgttaatgtgcataaagcttacaccacacgcaaacacacgtttgtattatgtcccccaagaggcctagaaagatccataaaaaacataacagcagtgacctctggagaatgggattaggggcgtaagaggaacttttgcaacttactctacttacttctacaaatgagcacttattacttctgcaatttaaaaactgaagccagctgggactggactaaaagtaaaaaaagaagaaggaaaaaagaacaaaaatcaatttggggtatctgtggcttcaaaatacagcgacaacagtcccttgctactcctcaggaggcttcctggccaggccgcctttgccgttccctgtcccttcgcagctctgaccctgtctcttgaatgttaggctgcacgcacctgcatgtacgtctcatcctgtgcgcctgtgtgtgtctgaggctcctatctccccaccaaaagagagacagggaagcacggggctttaaagctgggcactgggggcagattgcccaagatcccacaaattaaccatgcaaccttgtgtaaacagatcacctcaccgcatgccagttttcttatgaggggaacactagcattataccacacagagatctcagtgaggagccaacaggtggaaaatgtttagcacagtgccaggcacgtaataggtacttggtaagtgtagcctgttagtattactattattgttttagggttattgtttgcacacactttaagctagcaaccccacttccagatatctaacttgaggaaatcaaggatatgcacaaataccttcctgatttttatcacactgtctataatacaaaaaaattaaaagcaaccttgacaaaatacaaggaactgaccatggagagttatggttatctatatgacagacattatatgttgggtttttttcctccataggaccaaaggaaggaaattatgaggtcttcaaagtgatgcaacataactaattaatatggagagatgttcgtaactcttttttgttgttgttaagacagactcttgctctgtcgcccaggctggagtgcagtggcacgatctcggctcactgcaagctccgtctcccgggttcacgccattctcctgcctcagcctcccgagtagctgggactacaggcacccgccaccaagcccggctaattttttgtatttttagtagagacggggttttgccgtgttagccaggatggtctcgatctcctgaccttgtgatctgcccgcctcggcctcccaaagtgctgggattacaggcatgagctactgcacccggccgatgtttgcaactctttaacagtgaaaacaaatcccagcttttataaaatatataagctgggctgggcgcggtggctcacacctgtaatcccagcagtttgggaggccaaggcaggtggatcacttgagctcgggtgttcaagaccagcttggccaacatggtaaaacgctgtctttactaaaaatacaaaaattagccaggtgtggtggcacacacctgtaatcccagctacttgggaggctgaagcacgagaatcacttgaacccgggaggcagaggttgcagtgagccgagattatgccactgcactccactctgggtgaaagagcaagactctgtctcaaaacattaaaaaataaataaataaataagtaaatgaaatacataaactgagcagtgtggctcatgcctgttgtcccagctactcaggaggctgaggcaggagatcacttgagctcagatcaagcctgctgtgggctctgactgcaccactgtactccagcctgggagacagagtgagtttatttatttattaagataacagaggcaaaaatacacagccacggaagaaactgagaccatatatggcaaaatgtttataggggtatgaaatttcttgggtggagaaattatgagtgatttttctctctgctctcctatattttctaagttttctaaaatgcacaaatctcttcagcaattaaaaaataataatttgaggctgggcgcggtggctcacacctataatcccagcactttgggaggccaaggcaggcggatcacctgaggtcaggagttcaagaccagcatggccaacatggtgaaaccctgtctttactaaaaatacaaaattagctaggcatggtggtgcacgcctgtaatcccagctactagggaggctgaggcaggagaatcgcttgaacccgggaggcagaggttgcagtgagccgagatcgcaccactgcactccagcctgggcaacaagagcgaaactctgtctcaaataataataataatgataataatttggccaggcgcagtggctcatgcctgtaatcccagcactttgggaggccgaggcaggcggatcacttgagctcaggagtttgagaccagcctggccaacatgctgaaaccccatctctactaaaaaatacaaaaattagccgggtgtgatggcacctgcctgtaatcccagctactcagaaggctgaggcaggagaatcgtctgaggtggatggaggcagaggttgcagtgagctgagatcgtgccactgcactgcagcctgggcaacggagcagaaactgtctcaaaaaataataataaataataataacattaagaatttgctggtccaaacatggtgagttactgtgatgattcacagttgattacagacctacttacagatctgccttctccccacttcccactactgtatttgattagtctttaaataaataattaacaaataaaaaataatttaatattacccttgggaaataaaaagccatgcttcataaatcttcacaaggtatctaaaaaaaaaaaaaaaaaagccacacagggctcctatggccactgagacaaaaaaaaaaaaaaaaaaaaaagccacagaggcattcagggacacattccaacaggggtgtccccacgtctgcctcctgcagcgggtttccctccctctccccaggccaggctccgcccacagggtgaaagccattccagccatggctggctaagatcctgatagttcagcatccccagtggggacggaaaaggactgtggagtctttggacttatctctcaagccaaacgtgtcacgtgtccccagcccccctccccgagcacactcactgtcggagaagctgccgcccctccttccacaccaacgggctgttctccagggtgaccgattccacggggccattggagactggcgggtgagagaacggaggctgtcttaagtcaggccactgccacctacccatcacctcctccatcttcctcacccctccaacccaaatcggtcactgtcgcaggtcctgtggcatcacttcctgagtgttggaaccctgctctcttcccttactcggggattcctcctccttgaagcgttcctcatctctaggtctcctgactggtggttccccaaactggcccccgacaagataagggtgttatctcaaaaccagaaagctggcctggttctgagagaagggccgactgggttcaagcccagctctgccccatcccagctgtgtgaccctgagttagtgtaagccgtgtcagtttcgtcctctgagaaatgagcttaatgataacagcatctccctcttgggagtgctgagaggatgcaatgagataatttgcttagtattttattcaagtctttcctgggcatctacgctgtgcctggccaggggcctgggctacatgggtaaacaaagacctgcccttgtggaacttccgttctagtgagaggagctggcagcaggtaatgaccatcactatcagctgagcacacaaggtcttctcagcttgcctcggccaagcttccccctcacccagcccgccctcccacatcctctgccctacactgtttgcccaggcacactgaccgactccctgtcccctaaccctttcagcgtgcgtctctgtatctgtgctctctcccctgactctcctgctggggaacggagtcatctttcaaggagcttagactctaagggaccagagggtagagaccatgtctcccgtgctctctgctgtattcctgatctgtgatacaaagcctgtaccctacaaataaagtcttttttggatgaacgattgaacggcaaccctgttcaaacgccacctcctcagtgacgtcttccccggctttcccgcaccgtccccagcactctataaatagccctggcgcccactcctcgcaaagggatcccgtgagctgctcgtgtgtctgcctctgttgcacagggggacccaagcgggactggcccccagggtccagcacgggacctggcagcccatagggagggctctgagagtgagattccgcccctccccagccccggggccgattctgccttctaaggagcaaagtgagaaagaggcaccccatcttcctgcttctccagaacactcagcttctgcgggagggtgccgacagtgcgagcatcagagggtgggtaccttgttctgacacatctgctttcttctccccctggttcaggtctgtcccaaacttcagtttatgatatttggccctaaaagagcaaatgattaatgaataagagatgcgggagagtagacagggtcagtagttacctaaggaatccagaatcccaaaccccaaatcacagggcctcccccagctcgtctactactgaggctgaagcatccccccacacccctggcctggtggaagaaaccactccctggagtcaggcaacctaggttgctctcaggggtccttgaggaaaccatcagcccttgaaaccccagttccttatctgaaacagggctaacaatacccgttaggctattggaaggtataagggataacggaggtaaggactatacgatatttggcgcacagtgggccactagcatcgtgaatatcgttcctggtgtctaacccaaatcccacctactctgtcctgtttctcccctagaatcttatggtactggaatgatggaaaagaatgtcgaccccaaatctcccttagctggaaggaggcgtggctggtggcctcctgacactgtgcttgagacggacccagaaggcaggcccagggcaggatgaaggctcacctttcctgcttcagcgcatactctagcatcttgatccgccgcaccaggtccgtctttagattctcctgccctttcctctctccctgaaggaaggccacctgagcctgggagggcagacaggaggcaaagggagataatggggctcaggctcaatgccggtgtgtctatcactcacccaggtatagtgccagcccacagtcaccccacagtaatgggcagcagccacttcctcaggcacaaagatcccaagccagggttcagggagcactgagaggacaggatggatctgtttccagggccccctgccacgtcacccacaacgagggccgaaggggagcccttaacccctgagataacaatggggccagcctgggcctcacctggtggctgcctttggggggaagtcgggtcagggatggcagtggagaggagggtgggcattcaccgccctggactacccctgacgccctctggcaggtgctgtccctaaggctgctggtggaggtggcgtcccactattcttaccagagcatctgtctctgggaggcgtgggaagctacttctggagcttagggacaagagtgggtggctcggctcggctcctgctccaatagaaaagctttacaagccaagcccgctgtggggaccagccgtcccactgcattccgcccagggtgtgagagaaatgtgccacagacacgaccccgggttcctgccaagcacttcacaccgtctgctggcttgagctgccccgtctgctccagtctgtcaacaggtcatttggagacactgggcccactgccttccaggcaggatcctggcccctgaccatggtccagaagctcttctgccaaagccctggcccaaggctcatctctggcttctccccaagcaccccaccgttccagcccagaacagccagagcccaggcccaacttagacacttactcgctacatgatcttacgcaggtcatcagccttctctgagcctccatttgcccctctagaaaatgagagtcacaagagtgccctcccctcatgtgctaggttctgctcagtcaaggcctggcacagaataaaggctaacaaatgccagcttctacttctttcatcatttttattctccctgtccattgttcgcaacttcgaaatgggcccagttccttacgggaggtaggatcccttggagaccccagatcaactagaaatgtctgtggattggccaggcacagtggctcacgcctgtaatcccagccctttgggaggctgaggtgggcagatgacttgaggtcaggagttcaagaccagcctggccaacatggtgaaaccccatctctactaaaaatacaaaaaacttagccaggcatggtggtacacacctgtagtcccagctactcgggaggctgaggcaggagaatcgcttgaacctgggaagtggagattgcagtgggccaagatcgtgccactgcactccagcctgggcgacagagccagacttcgtctcaaaaaaaaaaagaaatacatgtcaccagttaccttatagaaaagaaaactcatctgtccgcttcaagaatgggaaatttttttcctttttaacactttttaccaacacatatgtatataaacatccaaggccagacagggaaactacttatatgacatcagcatctctgaagcatgagtttctgtcctttgtgtatcttctcagtcccccaaatctactctctgaatcactggagaaggtgtgaggagaggcagaccgaccaccgaagacaagtcctgactttcctcctcactctcctcccttccctcctggggtttggtgattgatccctcaacctcccaggggcagttcagcctgccgggaacctacaccttggtcaatacctgccactgtttggtgactgcccacacacatcaggtgccccagtaaggcgctggggaataacagaggagccatgtggttcctgcacccacagggctcagtcccatgcaggagacaggcatgagcagcaactcacatgcaatgtgactaggaccccattgcgggagcgaaggacgctatgggaagagggacaagaggcgacaattcagctaaggcctgaagctgaagagaagttagccaggggagggaagggccctgctggcagaggacggagacaagagctgcatggtgggcttaaggaactctaaaaaaggccaggatggctgcttcagaacctgtaaaaggctcagtgaagccatggaagggttttaagtacagagaggtaaccgattcgcatgttataaaggcagctccagctaaaacatggagaactgactggagggagttctggagggagactagagggagggagcaggagagcggcagagctggacacagagacccccatcacagatgagggcagtcccagaaatcccaggacagaacggtagtggcttggactaggccggggcagtggacacagtagtggtctatctgtgggggcaggaggtggagttgggcatcccaaccagacctgtcactggctgggttcccccttcatccctctgctgcctcatcgagctgtggtctccctcctcctaatgaggatgtgagggtctcagctgcccactctgctttgctgtccctttcccagtgcctctggaaagagaaccagaaagacatggttggagcatctcagggaggtggaaacccaccaaaaacgggaagcgtcagtggccagtctctccctcgctgcaaacgccagcagcccccacgggctgtctggtctgcgagggccaaggtaggcctgagggtcggtcggggatctggaagtgccgctcaccatatccacccactgccactccctctagccagagccgcagagcatgcgctcccaaaaccttctgatacctggcagctactgcctctccgcccctccagctattcccagcaaggcgacatctaaaggcttcggaggagtcccagcaattcagtcctcccaggagctgatgcctctctgaattcgctgcttcctgtcccagctagctgggaagagtccccgtttcgtgccatctagccctgcatctcctaagggcctccttcccaagcttcagcagctgctggcaggaatgggcccccaggaagctgaagtgggcaggggcagctccgcacattctctgctggcaccgcactcactgcaggtccctgtcgctgctcctatacaaatctccagttcagatccctcattaaaaggtccctcccatcctcaaaaagcttcccctctcagagttgccacagaacaggggcagagccacacaatcaactgtgcatgaacatctacagctctgcggtcccctgcacaaacaagcttcctctgccagcctggaagtttcggatgggcagaaaccacgttacttacttctcagaatcccccacctagcaaatgcctgctcattatcagactgcagctccgccaccttcctgctccaaacttatggtgactactggcaggacctccctgggggctgccttctctgccattcaacacacaggtaccaagcagggtcgcacggcaggtcttctgctaggagcagctgtattaagctcttcagagaaaagttattcagagtccatcaggaaaatctgacactgcctagctcttaagggatctcacaggggaagtcacaccgtctgttagcactaagtgttcaagtaaaggtgtgtaaaagaggtgccgctgatgggagagtaaactggtgggtcaatgtggcagagtcattcactgtttctttttttatttttattttttttgagatggcatctcgctctgtcaccaaggctggagtgcagtggtgtgatctcggctcactgcaacttctgcttcccgggtacaagcgattctcctgcctcagcctcccgagtagctgggactacaggcgcccaccaccacgcccgactaatttctgtatttttagtagaggtggggtttcaccatatcggccacgctggtcttgaactccagaccttgtgatccacctgccttggcctctcaaagtgctgggattacaggcgcgagccaccgcgcccagcccaatcactgtttcataaacacatccattctactattccactcatctgttctgcttcattcttgcacaggaataaggggttctcactgcagccatgtctgatgggggaaaaactagaaaaaatctaaaagtccaccaaccagggtcaaactcaatcagctatggtgcaaacatcccgtgggacgctatgcagctatcaaaaagaaagagttctctgtgctgatatgaaaggaaaaccaaaacagattattatgtcacaaaatgatacatacagcagtagttcatctattacataagcacaataactcttctctctcaggagagaagagcaggaaagggacgaagagaaggaactttcctttttcacttacatatatatgtgtatacacacactcacacacacacacacacccctctgagatgtctgaatttttactaacttaacagaataaaagaaaacaaaagtacaaagtgacagtgctggtaccatgccagacacaagttcctctcaaactccaagaagggtcagtaagtgaggggataaacatcttttctctcatcagcctccaggatgagaagatggtgtggtgggtgctgtgcggtgcactggtgcaaagtcccagaggccaagattcagtccaagctctgctatgactgcttgggtgaccctggggaggccactatgcttgcctgaaccaattttctcaactgtactgggtagcagagaggtacagaacatgggcttaaaagtctaccgacggtcgggcatggtggcttatgcctgtaatcccagcactttgggaggccgaggcaggtggatctcttgaggccaggagttcgaaaccagcctgaccaacgtggcaaaaccccatctctactaaaaatacaaaaatcagccaggcgtggtggtggtgcacacctgtaatcccagctacttgcgaggctgaggcaggagaatcgcttgaacctgggaggcagtggttgcaatgagccaagatcatgccactgcactccaccctgggtgacagagtgagactctgtctcaaaaaaataaaaataaaaataaataaataaataaataaataaacaaaaggtccaccacagaccagcccttctgctcatctgctgggatcctagataaatcaccctctcaaaacctccatttcctctcctgattttttttaaaggtagggggaatatcctttatcctcccagaatgctgcaagaattaaatgacagctcgtatctacagtacttgatacagcgccccagacatggtatgtgctcactaaattgcagctggtaccgttattgctgagtgaggtaatgacactgcctctgcctacatcacagggcattgtgaagatctgatgagatgtatgctgggaaagagcttcggaagtagagagtgggacagaagtgagagcagttacataaggattctgctcccatcccagccccaagcctcagccaccacaagtgagggcagggggagagttactggagggtctttactcatcctatgaacaaaatgcttttttttgagacaggatctcactcttttgcccaggctggagtgcagtggtgcaatcatggctcaccgcagcctcaacctccggggtttaagcaatcctcccacctcagcctcctgagtagctgggactacaggcgcatgtcaccacacccggctaatttttgtacttttttgtagagatgaggtcttgctatgttggccaggctggcctcgaactcctgggctcaagggattctcccacctcaacctccccaagtgttgggattacaggcgtgagccaccgcaccccatccctaccgacacaattctcatcagctatttatttgggtaccagcttcctactagatagcaaacggcaaatcggaaggggaaaggtgggctgctacaagcaggtaatgacaatttctgctaataataacccagtccaagaatcttcagacttccagcgggccattcctgatcccttcaaatccggacatctccatggtcctccagtcactgccaatggacctgacgctccacgaggtcacaaaccctagcccaactcctcagactcttccattcaacatccctgtcccaagctaccccaaaaaccacggggtcttttcccaagacttccacaaacatatccccttccccccaaccccagtctacccccgttccgagatgcctcctcatgttgccttcgggctctacaaaattctcccccctaaagcatcaccccagggtaacccctaactcgtcctcattggcaccatcccaggaccctcacctccatactggacatgcccaacaccccacactccagttcagggctctctacctacatcctacaacacacgtgccatctcagtgccatcgcgcccactcctgcacacccccaaagtggaacttccactcttaagctctcccatccaggctcctagggtacattccctgctctgtccacacttccactccaaagaacccttccctgcactgtgcagccacacatgcccgggatccccaaagtttctcctcagaggggaaggcacacaccttcatcctggaccccttgaaaccctcctcccacccctcgggtccttacacagccctccttccgtgcccaccgtccagtcgccccgaaacacaccgatcccaggttcccgacttcctctccctaaatcctcccggttccccatctggacccgctctttcccagcgggtcccaagttccccccttggacgctcccacctccaacctgcacctggctagggccatggtcggggtcggggtcgggagtccctcggcgcccggcaagcttctgcttactcccacaggagaccactcaggtctcccagacccctccagctcctctccacaccctttcccgagttctcttagcctcccctccagggctcgagtcgcctctctcaggagccccgcggccagcgtgctcagtcccagtcccagtcccactcccagctggttgtggtccctccgcccctttctctcggccggtcccggtgatccctcccacccccggtccctccactcccacctcgggccgtcccggtcccgtcccaccccggagtgccctcaggacacccctcggacggcccctcactcgccctccgggaccgtcgcggtcccctcccgcccccccgccggccgtcccggcggccattgctccaagatggcggcggcggcggcagcgggtgaggccgggccgggccgggccgggttgggggtcgggggtcccgggacagcgctcacctgtaactcggcgcgctcggcctcccagcgggctttctcggcttcgaagcgcgcccactcgtgctggataaagtgcaggatccccggcaggctcaggggctccgggcccgccgtgggcccggggctgcctccgccgccgcctcccttacctgccgggcccggcccgggggcaggggcggagaccggggccgccccagtggggccagggcccgcgcctgagccgagcggacggcaggaggaggcggcggcggcgaccgcggcggccgctcgctcctccatcatggaggccccggggccggcctgcgcgcccgctgtgcctcgcgcgcctgcgcggccgcgccaacacccccccccctcccccgccgcaaccaccgcgcgcgcgcccggcgggggacagtaggaaggggggccggcggcgagcgcgagcctcgcccacccgggtctacaccgaagggtagcgtgcccgcgcgggggccggcgggtgggagatcgcgccccgaggagggcgagggagacccaggccccgcgcgacggtccccctcgctggagtgagactgaggaaggggccgctttctgcccccctcctcccacttcgccccagagaaagagccttaccccttccacacccaaacaccactctcctggacaattacttttactctgagagaaagggcgaccagcagtggccccatcctctctgattgccggccaggttggttgtcatggtaacccttccccagcggtgggggcgaggtggtggggagcagccttcccctcgcttccacctttgtggttatggagccccaaacctcttaggactctgcaccaggagaaggttgctaaggtaacctaagtgtccgtggtggtccttctgctcctatcctcattgattactatggcaacctcccccccacctagcattcaggtagaaaggaccccagccccaaggacactgatctctaagagaagcacctcttccccagcccctcccccatagccacctagttggcattaccatggtaaccgtcttccccttcccatcgtgggaggcccatgcaccaaactaaccaggtgtttttatttagaggagatgctctgctgaggggcagttgctatggttacagggcctggaccttcctccggaaggtgagaaacaggcaagttcaaggcctggttactatgataatagagcagcccccttcgagtgaccctaggaaccaagcccaacaaaggaggggatttttttttttttttttttttttgagacagagtgtaactcttgttgcccaggctgggatgcaatggcccaatctcggctcaccacaacctccgcctccccggttcaagccgttctcctgcctcaccctcccaagtagctgggattacaggcatgcgccaccacgcccggctaattttttttttatttttagtaaagacggggtttctccatgttggtcacgctggtcttgaactcccgacctcaggtgatctgcctcaggcccgcctcggcctcccaaagtgctgggattacaggtgtgagccatcacgcccggccaggggatgttttaagaatgtctctcagaggtagagtgtgtctatggaaggggttgtcatggtaacagcttctgttggcttctagccctaccttttctggacacattcatgctagagggatggttataggttgctataataactgacatccctcccattcaccccaccccactcctgagacaccccaggtggtgcccgagattataggacttcaagagaaaggattccctgacctttctcttgccacttttgtggataagatgaaattgtgctctattgtacggaaatggctgatttgggattttctggttctcctcctctcaggagcgcagctcagctgggctggaactgccctcctggaactcccccagcctacaacctaggaggtaagaagtccctcagtgtcacctacactctcatggaaactgcccttcctcattccttaaggctttcccatgtctctcatttttttctttttctttctttcttttttgagacggagtgtcgctctgttgcccgggctgaaatgcagtggcgcggtcatggctcactgcaacctccacctccctggttcaagcgattctcctgcctcagcctcccgagtagctgggattacaggcacctgccaccacgcccggctaattttttgtatttttaatagagatggggtttcaccttgttggcaggctggtctcgaacttctgacctcgtgatccgcccgcctcggcctcccagaatgctagaattacaggcgtgagccaccgcgcccagccctctcatttttttctaaccgtcacattcccattccacaggtgcagggactgaggctcaggccaaatcgcaactcagacccagtgaacccaaggcctgaagagaatttggattcatttaccttgttttgtggggactggagagacaagtaaactctcagagtaactgtcccctctgactaccatttctaaggcaagccccctgtttctactcttgcgccccctgctggtttcctgccctgtctgtaagttgcatggcttttgtccgtcttttttttgtttgtttgtttgttttgagacagggtctcacccaggctagagtgaagtggagcaatctcggctcactgcaacctccgcctcctgagttcaagtgattctcacacctcagcctccccaatagctgggattacaggtgcgcaccaccatgcccagctaatctttgtattttttggtagagagggggtttcaccatattgcccacgctggtctctaactcctgacctcaggtgatctgaccgcctgggcctcccaaagtactgagattacaggtgtgagccaccacacgtggccctgtcagtcttctttctgtcttctggagggctgacctaatgagtacctcgttcattctgtatcctcaaaacatggggtccaccacaaagaatacttgagtttgttgagttactgagttgaattaatttattaatgtgccatagccaagctttgaaagcccctgtcaggttagggctggggaaggctcactaaagatgggctgagagttggggcttcagaaagaacccaagagagaaggtaaagtttactggtttaaagtacgactctgtagccagcttcttggatcaactcttgggtccactacttcacattgtgtgaccttgaataagagactttaactctttaactctctgtgcctttgtttcctttttttttttttttttttttgagataaggtctcgaggccaggcgcggtggctcacgcctgtaatcccagcactttgggaggctgaggcgggcggatcacgaggtcaggagattgagaccatcctggccaacatagtgaaaccccatctctactaaaaatacaaaaattagccgggcatggtggcgcatgcctgtaatcccagctactcaggaggcggaggcaggggaatcccttgaaccagggagttggaggttgcagcgagccgagattgtgccacagcactctagcctggtgacaaagcgagactccgtctcaaaaaaaaaaaaaaaaaagagtctggctctgtcacccaggctggagtgcagtggcacaatctcaactcactgcaacctctgcctcctagactcaagtaatcctaccacttcagccaccagagtagctgggactacaggtgcacaccaccatgcccggctaattttttaaatttttttgtagagacggggtcttaccagtccatgctggtctcaaactcccaggctcaagcaatctcccccagcctcatcctcccaaagtgctgggattacaggcatgagccaccacatcggctggtttccatttttaaatgtgatcataacacgaggattaaacaagtgaatatgcctaaagtgcttagaacagggcctggcacatggtgagctgctagaattgttattattatcctcccgattcagaaaaatgtagaacattcagaccttcaaaatcatcattgtatccactttgccccaacgaaggggtttgttgcccttagaggcggtgaagtctgcatggctttatcagggtactagatgattcctttccccgcctcaggttccctcacaccctcaccagcaggtggcacctcttcatctggccatcaaatctgctggtgtctggtctgcgagggccaagagttgtgctgggcctgagggtagccaggacctggctgctgtcctctgccctgctgggcacctccttcctggcccagagtcagtcagacagtgtggcaagagccagggcctcagaagcggagacctcggttctcgaccctgcatccttcttatctctctgagccagaggttcctatctttcgtttttgagactgggtctcgctctgtcgcccaggctggagtgcagtggctgaatcacagctcactgcagcctccacctcctgggctcaagggaccctcctgcctcagcctccctcctaagtagctgagaccacaggtaggcaccaccacgcctggctgatttttgtatttttttagagacggggttttgctatattgcccaggctggtgttgaactcctgagctcaagcgatcctcctgcctcagcttcccatagtgctaggattacaggagtgagcccccatacccagcccacgttccttatcttaataattcaagtcactcattcattcaacacgtatttattgagcacctgctatgcaccaagcactgagctgtgctctggggatacagtagggaagaaaacagattccctgccttccatggagattctgacaacaaacaagctaagtaaaatccacgtgataactactaggggagcaaaataaagcaggaatgggggataggaagtacatgggagatgctttttttttttttttaaagacagacaaggtctcgctctattgcccaggctggagtgcagtggcgccatcacagctcactgcacccttgacttccccagctcaagtgatcctcctacctcagcctcctaagtaactgggactacaggtgcaagccatcacatccagttagttttgtttattttttgtagagatggcatcttactatgttgtccaggctgatctgaaactcctggtctcaagcgatctgcctacctcaatctcccaaagtgctggaattacaggtgtgagccactgcacctggccaagatgcatttttttgtttatttacttattttgagacagagttttgttgttgttgcccaggctggagtacaatggcatggtctcagctcactgcagcctctgcctcctgggttcaagcaattctcctgcctcagcctcccaagtagctgggattacaggcgcctgtcaccatgcccagctaacttttttgtatttttttttttttttttttttgagacggagtcttgctctgtcgcccaggccggactgcggactgcagtggcacaatctcggctcactgcaagctccgcttcccgggttcacgccattctcctgcctcagcctcccgagtagctgggactacaggcgcccgccaccgcgcctggctaattttttgtatttttagtagagatggggtttcaccatgttggccaggctggtcttgaactcctgacctcaggcgatctgcccacctcgccctcccaaagtgctgggattacaggcatgagccaccatgcccagcccaccaagatgcatttttaaataggatggccaaaggaagaggttatgggaaggtgacattggagtgatgggggtgggggccggcgcagtggggtggatcgcctgtggctatctgggataagaacactcagacagaggcaacaggcagttctgcagctggagtgtcccaggtgtgtttgaaagatggtgttggtggccaatgttcctagagctgagtgagtgagtaggaaaggatggaagatcacgcggggccttatgggccacattgagtaccttggcttttcctgcgaggtgccagccacagaagggcctgagcagagccaggacaggatgaaatgtgagttgtgacaggatctctcgaggtgctgaatgaggaacagaccacaggaacagaagcgggaagacagtctcttgctgtgaccttcaaggatatgcagactaaccatctcatgtgtgttcggagctcctatgtacctaaactctaagattttgaagggcttgaggttctgtggttgcaaaggttcctgcccctgcactaatgggagctccacaagggcaggaatgttgtctgtctctgagcatctgttgctctctctccagtgcctagaacagtgcctggcatgttgtaggagttcaacaaatagatgttgaaggattgaaggaaggaagaatcaatctaaggtccagaaggcaattccaggattctaaagattagaaaggacatggtgactcacgcctgtaatcctggcactttgggaggccgagacggaaggatcacttgaggtcaggagttcgagaccagcctggacaatatagtgggagccagtctccacaaaaatgtgtttgaaaaattagccaggcacagtattgcatgcctgtagtcccagctactcgggagactgaggcaggaggatggcttgaacacaggaattcgaggctgcagtgagccgtgattgcaccactgcactcaagcttgggcagcagagcaagacgctgtccgtttaaaaaatatatatattttggctgggtgtggtggctcactcctgtaatcccaacatttctggaggccaaggcaggcagatcatgaggtcaagggattgagaccatcctgcccaacatggtgaaaacccgtctctactaaaaatacaaaaattagccgggcatggtggcacgcgcctgtagtcccagctactcaggaggctgaggcaagagaatcgcttgaaccctggaggcggtggttgcagtgagccagtcgcaccaccgcactccagcctggcaacagagtgagactccgtctcaaaaaaaaaaaaattgtttttggctgggcgcggtggctcacgcctgtaatcccagcactttgggaggccacggcgggtggatcacctgaggtcaggagttcgagaccagcctgaccaacatcccgtctctactaaaaatacaaaattagccgggtgtggtggcgcatgcctgtaatcccagctactcaggaggctgaggcaggagaatcgcttgaacgcgggaggcagaggttgcagtgagatgagatagctgccactgcactccagcctgggcaacagagggagactccatctcaaaaaaaaaaaagaaaagaaaagaaataagagcagtttgagaaaatgttcagggtgacttaaacatacaggttggggaaagcatggcaagagatgagggtggaatggggggcagacaaggggaatgtcagaagcagcttccactttctcccctgggcactgggagccatggcaagttcagagcaggggaaggagaggtccaacttgtgctttaggaagactcctctggctatcacggggagaggaattgccaggagaccagggggaggttggatgggaatgtgggtggacctggttgaggagggagctgtggaaatggggaggaggggacagaggatttaggacatagggaggttagttggatgccccctctctctaggaagggcagaaacctacaaaaagccttcatggggaaattatttgatcatctgcttggaacccagagctataccacctgtgctggagaccggccagccaaatcttcagtctcggtggggacaaggagacagcgccatctggtgcttgagggtgtggccaatgaatgtggaggggagtgtcctaaggttggcagcctcttttgatgcaagctaccccagttttttgttgttgttgggtattttgagacagggtctcactcttgtccaggctgagtgcagtggcatgatcatggctcactggctcaagccatccccccacctcagcatcctgagtggctgggaccataggtgagtagcaccacacccagctaattttttattttttgtagagatgaagtctccttatgttactcaggttggtctcgaactcctggactcaagtgatcctcctgccttggcctcccaaattgctgggatcacaggtgtgagtcactgtacctggcccaccccacttttgttttttcttttttttttttaatttttatttatttatttatttatttatttatttattttttgagacagtctcactctgttgcccaggctggagtgcaacggtgccatctcggctcactgtaacctccacctcccaggttcaagtgatcctcttgccttggcctcccaaattgctgagatcacaggcgtgagtcaccatacctggcccaccccacttttgttttgtttttcttgttttaaattggtttgtttatttatttatttatttatttttcgagacggagtctcgctgtgttgcccaggctggagtgcaatggtgccatctccgctcactgcaacctccatctctcaggttcaagcgatttcctgcctcagcctcctgagtagctgggcttacaggcacccgccctcacacccagctaacttttgtatttttagtagagatggggtttcaccgtgttggccaggctggtctcaaactcctgacctcaggtaatccacctgccttgtcctctcaaagtgatgggattacaggcataagccaccgcgcccagcctaacctttttttttcatttatatttttcagcaccccacttaaaattttttttaaattctgattaagtatatataacattaaatgtaccatcttaaccatttttcagcacacagttcagtagtgttaaatgcattcatactgttgtgccaacaaacctctgggaccttttcatcttcccaaactgaaactctgtacttatcaaacaactccccattcccccctgcctgcaacccctggcacccgtcattctactttatgtttctattagtttgactcactctgtttaaaaaaaaaaaaaaaaattctgaggacacccagagttggtgcatggcccagactgggaggtcagggagtgcttcctggagaaggggaagtcaaagctgaaaccaaatagggaaaagaaagggaattgagaaagagctgtagaaaggggcaaggctgagggtggcagaagggggtggttctgacaatcagctgctgccttccctttcgtccccctcccccaggatgccccggaggcccagctagccccagacttcggccccatgcggctcacccgctgccaggctgccctggcggccgccatcaccctcaaccttctggtcctcttctatgtctcgtggctgcagcaccagcctaggaattcccgggcccgggggccccgtcgtgcctctgctgccggcccccgtgtcaccgtcctggtgcgggagttcgaggcatttgacaacgcggtgcccgagctggtagactccttcctgcagcaagacccagcccagcccgtggtggtggcagccgacacgctcccctacccgcccctggccctgccccgcatccccaacgtgcgtctggcgctgctccagcccgccctggaccggccagccgcagcctcgcgcccggagacctacgtggccaccgagtttgtggccctagtacctgatggggcgcgggctgaggcacctggcctgctggagcgcatggtggaggcgctccgcgcaggaagcgcacgtctggtggccgccccggttgccacggccaaccctgccaggtgcctggccctgaacgtcagcctgcgagagtggaccgcccgctatggcgcagcccccgccgcgccccgctgcgacgccctggacggagatgctgtggtgctcctgcgcgcccgcgacctcttcaacctctcggcgcccctggcccggccggtgggcaccagcctctttctgcagaccgcccttcgcggctgggcggtgcagctgctggacttgaccttcgccgcggcgcgccagcccccgctggccacggcccacgcgcgctggaaggctgagcgcgagggacgcgctcggcgggcggcgctgctccgcgcgctgggcatccgcctagtgagctgggaaggcgggcggctggagtggttcggctgcaacaaggagaccacgcgctgcttcggaaccgtggtgggcgacacgcccgcctacctctacgaggagcgctggacgcccccctgctgcctgcgcgcgctgcgcgagaccgcccgctatgtggtgggcgtgctggaggctgcgggcgtgcgctactggctcgagggcggctcactgctgggggccgcccgccacggggacatcatcccatgggactacgacgtggacctgggcatctacttggaggacgtgggcaactgcgagcagctgcggggggcagaggccggctcggtggtggatgagcgcggcttcgtatgggagaaggcggtcgagggcgactttttccgcgtgcagtacagcgaaagcaaccacttgcacgtggacctgtggcccttctacccccgcaatggcgtcatgaccaaggacacgtggctggaccaccggcaggatgtggagtttcccgagcacttcctgcagccgctggtgcccctgccctttgccggcttcgtggcgcaggcgcctaacaactaccgccgcttcctggagctcaagttcgggcccggggtcatcgagaacccccagtaccccaacccggcactgctgagtctgacgggaagcggctgaagccctgataacctcgcctttgtttttcgggggtctgtctggatgtggagaagctctgtgtgagcggtgaggggtggagggatgtcgcggagaggggaagggggaaactgaccaagaaagaaattctaaggagagcatgagagaaggctggcattggcaggaggagagcaccaggacgaggatgggaagcgacctccagatttatcaaatggtcatgcccactgggagccgtggatatgcgtggggacatcctgggtcatctcagtcatggagggagacggggatgtcacgccgtcccgcagggcccagcacagccccagacccgaaaaaagtgttctgcccaagattccgagagccctgcgctctagggcaggggcagagttttggaaacagtgcaggctctggagccagactggcgagattcaaatcctggctctatcgcttcggagccaggtgggcctgggggggcgtcgcagtctctctgtgcctcagttgcttccaggatgcgggacccttggctgcaggggttgcttccgccactagagggcgcgccggtcccgctcctggtggcccactgtggctgcccgggcgacagtacgcccagggcctgtgttccatagccatctactctcttgagcctttggacttctctccaagcccctgtgggaggcggacagcagtgaccacctccccttcttttggactgcgacctccttccctcctgggagagccctgtgacctgcatgctactcttaactgttctattcaagactgaatagaagtatttcagtcttgcagaggaggaaatgctcagagctccgaggtgcggctgtggtcgagaaccgggtgctgggccgggcgcgggggctcacgcctgtaatcccagcactttgggaggccgaggtgggaggatcgcttgagcccaggagtctgagaccagcctcggcaacatgccaagaccccgtctctatttttaaaaaagaaaaagaaccgacttctgaatcgcagctccactcatgactaatacctcattatttcagctgtctgcacctaattccccacttgcacggcagtgtagacaataaccatagctcacactcactgagcacctactgggtaccaggcaccattctcagtgtttcacctggatcaactaatgcgtccctcacctcagccctctgaagtgacagctgctattattttcattacacagatgaaaaagctgaggccagaatcgtgaagtcacttgctcaaggtcaggcagcttaggaaggggcagatcgggggcttgaacccaggtggtcaggctctggagcccacaattgtcttacccactatgcccctctctagtcatggtccccaagaggggcttggagacccacttagcaggtgaaagcaatggcagccttccttatttgattatgcacctaagaataaatggtatttgggcatgtattcccaatatgtgtatatttatttataaatatatacagatactattatctgtatgttagtaataaagcttaaattattccattttaaaattatgaatatgaatagggttttttttatgtttcttgcctcatcccaatgacttttgcacacccaggtgtgagcacccagcattcaagaccacgggttaaaaaaaaaaaaaaaaagctggccgggcgtggtggctcacgcctgtgatcccaacacttttgggaggctgagacaggaggaacacttgagctcgggagttcgagaccagcctgagcaatagagcaagactcttgtcaattaaaaataataaataaagccaggcatggtggctcacgcctataatcccaacactttgggagcccaaggcggacggatcacaaggtcaagagatcgagaccatcctggctaacacagtgaaactccgtctctactaaaaatacaaaaaattagctggacatggtggcgggcacctgtagtcccagctactcaggaggctgaggcaggagaatggcatgaacccgggaggcggagcttgcagtgagccaagattgtgccaccgccctccagcctgagcaacagagcaagactccatctcaaaaaaataaaataataaataagaggcaaaatgttaaaaataagcaaggactgggcacagtggctcatgcctgtaatcccggtactttcggaagccaaaattggaggatcctttaaggccaagagttcaagatcagcctgggcaacatagcgagatcccctgtctctacaaaataataaaaaaatagccactgttttagtcccttctcatgctactaataaagacctacctgagactgggtaatttataaaggaggaaaggtttaatcgacccacagttcagcacggctggggaggcctcatgaaacttacaatcatggcagaaggggaagcaaacacatcttgtgatggcaggaagaagaagttccaagcaaaaggggaaagttccttataaaaccattagatctcatgagaactcactatcacgagaatagcatgggggtaactgcccccatgattcaattacctcgcacccagtccctcccacgacacatggggattatcagaactacaattcgagatgagatttgggtggaaacacagccaaaccatatcagccaggcataatggcatgcacctgtagtcctagctactggggaggctgaggcaggaggattgcttaagcctaggagatcaagactgcagtgagctctgattgcacctctgcactccagcctcggcaacagagcattatcccatccccccacaaaaaaaaagaaaaaaagaaaagacatgggcttgaggttggagaggaccgggtttcccagtgctgccaccttctcccagggcctctattgactctgtctctgcgcccccaccttgcatttgggaagtggaagcaatgagatcgctcctcccacaggagtgtgttcgcggtaaaggggcccagagtctggctgggtttgaatcctggcttggccacttggtttctttgtactctcagacaagtcgctgcctctctgaacctgtaaactggggagattggtaatatttcacaattgtacattcctgggaggaggaggcttcatagaccagcaagagaagattactgtttggccgagtctcctgaggctcagacatccaaagcctgacttcttgtaacccaacccctgcttttaaccactgaacccaaaaatggttcacaaagagacttggcaggtccacagggaggattctggaatgcatggggatgatttgcattatcatcatgactggaagctgctcttggctcttggcagacgtggtccagggatgcagatgtcttgtaatattcaggaatctccacacagtacagcatcatcccttgtctcatgcagcttccagatgtctcattggacattcacgaaggaagggtaatattcaaaatgttttgccactggtactgtaatataaattagtatatgtcaatgtatgcatcaaatttttaaaatattttaggccaggcatagtgtaatcccagcaccttgggaggccaagacaggaggatggcttgaagccaggaattcgagaccagcctgggcaacatagagagaccctcatctctacaaaacatttcaaaaattgagcagggcgtggtggtttacaccattaatcccagcactttggaaggccgaggcaggtgaattgcttgagcccaggagttcaagaccagactaggggccaggcggggtggctcatgcctgtaatcccaccactttgggaggctgaggcgggcagatcacttgaagccaggagttcaagaccagcctggccaacaaggcaaaaccatgtctctactaaaaatacagcaattagctgggcgtggtggtgcacccctgcagtcccagctactcaggatgctgaggtgggaggatcacctgagcccaggaggtcaaggctacagtgagccatgatcatgtcactgcattccagcttgggcaacagagtgagaccctgtctcaaaaaaacaaaaatccttattatcacctaagttatgatatgacaaagatctgtcacaattaacttgaactaattcatttttattcaaatatgtattgaatttcagtgctttctcaactactcttgtactattattatccagtcagaagtatttcagtattttaacaaccagtattggccaagtatggtgactcacgcctgtaatcctagcactttgggaggccgaggtgggtggatcacaaggtcaggagttcaagaccagcctggccaatatggtgaaaccctgtctctactaaaaatacaaaaactagccgggcatggtggtgggcgcctgtagtcccagctactcaggaggctgaggcaggagaatcgcttgaacccaggaggcggaggttgcagtgagccaagatcatgccactgcactccagcctgggtgacagagcgagactctgtctcaaaaacaaacaagaaagaacagtatttccatactagttcagaccaactaaattttagccttacttggaggtgaaaaccctggccaaaaatctctctcttgtacgtacaaagtcctttttgtttttaaatagcctcggaatcttccaggaagtgcaactaccacaaaaaatgagggaagcttgtatcgtgttttgttcaaaacttggccaaaggttgtccaccatgtgaaaaaactcacattgcacatggctcttggtaattggacaccagtccacgtgttttcaatgtgttggaactgtctatattacaggcataaacatctgcctacctccttgggttctaggggactggctccacacatccgcataatgaaatgcttattgtaagttactatgttcttatttctcctttttattacatttagggcaatcaaggatcgtttttgttgctgctgctgttgttgttgtttctgagacagggtctcactctgtcacccaggctgcagtgcagtggcacagtcttggctcactgcagcctcaacttcccaggctcaggcgattctcccacctcagcctcccgagtagctgggactacagataagtactaccacacccagcttttatatatatatatatataaatatatttatatatataatgtctctactaaaaatacaaaaattagctaggtgcggtgtcgcacgcctgtaatgccagcagtttgggaggccaaggcggatggattacttgaggtcaggagttcgagaccagcctggccaacatggtgaaaccccatctctactaaaaatacgtgtgtgtgtgtgtgtgtgtgtgtgtgtgtgtgtattttaagtagagatggggtttcaccatgttgctcaggctggtctcaaattcctggactcgagtgatctgcccaccttggcctcccaaagtaggattttcttaaatcatgttaaatcatgtgccagtgggttatactgtctatgaacttcatttcaggagaacagagagaactttcccagaactgacattcaagccagcacacgccctggtatggccacgccagtggttaagacagcaaaacactaaattatggattatttactcattcataaacggtcactgccatgaaccccctgactattagtatcctcctagctctccctggggatcccctgggctgccctctggcccagaagtccaggggttaaactgggtatagtgggagataagagggacccatatcccggatgttggatggactgatgactttgccaagcagtaaatattttgtctatcagccctacatgttacaaaatatttgctatgaacaatagtggcatgtaaagacctgtctacattagccaggtgtggtggctaatgcctgtaatcccaacgctttggaagaccaaggctggaggatcacatgagcccaggaggtggaggccacccagggtaatatgttgagaccctgtctctaccaaaaaaatttaggaggggcgagtggctcatgcctgtaatcccagcactttgggaggctgaggcgggcagatcacttgaggtcaggagtttgagaccagcccagtcaacatggtgaaaccacgtctctactaaaaatacaaaaattagccaggtgtggcggctcacacctgtaatcccagcactttgggaggccgaagagggcggattacttgaggtcaggagttcaagaccagcctgaacaacatggtgaaaccccatccctactaaaaatacaaaaattagccgggcgtgatggtgggtgcctgtaatcccagctactcaggaagctgaggcaggagaattgcttgaacctgggaggtggaggttgcagtgagccgagattgcaccactgcactccagcctgggcaacagagcaagattctgtctcaaaaataaaataaggtaaataaaaaataaaaaacctgtctacaaatgcacctttatgcacaatagccccaacctggaaaccatcagatgtaaatcaacaggtgggtggataagcaaactgtggtacactcagacaacataatactccttagcaagttttttaaaaaaggaaagaactgggccggacgtggtggctcacgcctgtaatcccagcactttgggaggtcgaggcgggccgatcacctgaggtcgggagttcaagaccagcctgaccaacatggcaaaaccctgtctctactaaaaatacaaaattagctgggcatggtggcacatgcctgtaatcccagccacttgggaggccaaggcaggagaatcacttgaactcgggaggcggaggttgtagtgagccgagattgtgccattgcactccagtctgggcaacaagagtgaaactccatctcaaaaaaaaaaaaagaaaagaaaagaaagaacaaactactgatacatgcaaaaataagaataaatcccaaaagcattatgacacataaaaaaaagccagatgcaagacgctacatagtatatgattccaccaatgtaaaattctagaagaggtaaaactaattcatagtgaccaaaagcagatcagtggttaccggggcctggagctggagagaggggcagactgcaaagaagcatgaggaaatttggggatgatgagaatatcatgtatcttgattatgggagtggtttttcacagtatattcatctgtcaaaactcatttaactgtattttatttatttatttatttattttgagacagggtctcgcagcattgctcaggctggtctcaaactcctgggctcaagcgatccttctgcctcggcctctcaaagtgctggaattacaggcatgagcctggcctaattgattttaacgggtgcaatttatcatatgaaacaatttttttggagccagccttgctctgttgcccaggctagagtgcagtggtgcagtcttggctcactgcaacctctaccttctggattcaagtgattctcatgcctcagccacctgagtagctgggattacaggtgtgcacaaccacacctggttaatttttgtatttttagtggagatggagtttcaccatgttggccaggctggtcttgaactcctggcctcaaatgatttgccttgacctcccaaagtgctaggattacaggtgtgagccaccttgcccggcctattgtatgtaaattatacctcaataaagttgacctcaaaaagagcagatgggggcagaatccaacaggcctaagaacattgacctgtctctaagagagacaaaactgagtcactgccctctgcctttctgtccccatactgccactctgagcctagaacccaggaccaaccctaatccggggccagcctgggccctccttcctgggccaagctccttcaaagaggcaagaggggtgggtggggcaatggagaaagggagagaaaggtgggagctgggaactgggacccagggagtgaccgtcaaagtgccttttcttctgctcttacgtaacctgcactagcagcctttgggtgaggcataagagagccattgtcaccggcgggtgagacctggcagtgctcatccaaggtcacatagttgccaggcagcagagtcgagactgaaccagcctcttccaccattccacgagtgtttattgagctcctgctatacgcatgcaccggaccctatgctagactctgagcctacagcagtgaacaattcaaagatggttcccccacagagtgaccttcccagtggggacaggcaggaaacaataaacatcataaaccagtgaattctatcgtctgttgggaggggactgttgctattaaaaaaggagaacagggcagggcacggtggttcacaactataatcccagcactttgggaggcgtaggtgggaggatcctttcagcccaggagttcaaaaccagcctggacaacatacagagactgtgtcgctacaaaaaacaaaaattaagaaaaaaaaatagctgggcagggtagcatgggcctatagtcccagctacttaggaggctgaggtgggagtgtcacttgagcctgggaggtcaaagctgaaatgagctgtgatcatgaaactgcattccagcctgggcaacagagcaagaccctgtctttaaaaaaaaaaaaaaaaagtagagcaggcctggcgtggtggcttatgcctgtaatcccagtactttgggaggccgaggtgggaggattgcttgagctcaggagtatgagcctggccagcctgggccatagagcaagaccccatctctgtttgtttgtttgtttgtttgtttgtttgtgacagggtctatctctgtctcccaggctggagtgcagtggcgcgatcttggctcactgcaacctctgcctcccgggttcaacaattctcatgcctcagcctcccgagtagctgggataacaggcgcccgccactacacccagctaatctttgtatttttagtagagacaggtttttgccacatctctcgaactcctgacagcgagtgatccacctgtctcggtctcctaaagagctgggattacaggcgtgtaccacgacacctggctaatttttgtatttgtagtagagacagggtttcgccatgttggccaggccggtcttgaactcctggcatcaagtgatctgcctgcctcagcctccctaagtgcacagattacaggcatgagccactgcgtctgcccaagaccccatctcttaataaaaaaaaaaaaaaaaaaaaaaaaaaagaggaaaagggctgggcgtggtggctcacgcctgtaatcccagaactttgggaggcctgaggtgggcagatcacgaggtcaggagatcgagactatcctggctaacatggtgaaacccccgtctctactaaaaatacaaaaaaaaaaaaaaaaaaagccgggtgtggtggcgggcgcctgtagtcccagctactcgggaggctgaggcaggagaatggcgtgaacccgggaggcggagcttgcaatgagccgagatcgtgccactgcactccagcctgggcgacagagcgagactccgtctcagaaaaaaaaaaaaaaagagaaaagggtagaatagggtatgggttgggtgggtgagggtgggggcaggaagcaggggtggtagaattaaataaagcggtcagagaaggctcactgaggtgacattgcagccaagtcgagagggaggtgtgggaagagccaaatggaaatctggggggcagagcagccaagagaggaacagcctgtgcaaaggccctgaggcaccagcaggcctggcatgttcaaggaatggcagaggctggagtaagagagggaggaggagagtgggaagaggtgaggtcggtgaagtaaggcgcatcctacagaggctatggggagcaccttggatttttctctgggttctgagctgcggagggccacgagctgccatgatggaaacaggcgccctctggaggccatatggggaacagacggaagaggttggggctcaggagtcccggcgtgaaggcaattgcaatagttcaggtgggagatgatggcagctggccagggtggtacccagtgtggaaggtgtagaggggccagatttggggtttgagggcagagaaactgagatttctggtagcttgaatgtgggatatgacgggcagaaggagggcgtagcaggggaaggaaataaagtggcttgttctgtatgtgactggagcccagctccttgcaccaacccgggctcctgcacccctcagcaggcccagggatccccaccgccaggccggagccaaccccatggaacccaaagtgctcaagctccccagtgaatgaggctcttaatgtatcaccgcccgtcaggcctggcctggcatccgggtttctccacctgcggggtgcaggggccacattggtgggttccagattccaagttccagtatttggaggaggtggcagaggagggcccccaccccaccgttttcatctttcacccaagatttgcacaggtttcattttaatgacagtccactgtctgtttgttagttagctttgagatagagtctcactctgttgcccaggctggagtgcggtggcaagatctcagctcactgcaacctccgcctcctgggctcaagcgattctcccacctcaggctcctgagtagctgaaactacaaatgtccagataattttttacatttttagtagagacggggttccactatgttggccaagctggtctcaaactactaacctgagatgatccacctgcttcggcctcccaaagtgctgggattacaggcatgagccactgcgcccagccacccagccactggttttaaaaaatgtttgacactgggcacagtggctcatgcctgtaatcccagcaccttgggaggctgaggtgggtggatcacctgaggtcaggagttggagaccatcctggccaacatggtgaaaccccatctctactaaaaaaaaaaatacaaaaattagccgggcgtggtggcaggcacctgtaatcccagctattcgggaggctgaggcaggagaatcgcttgaacccgggaagtggaggttgcagtgagctgagatcacatcattgcactccagcctgggggacaagagcgagacttcatctcaaaaaaaaaaaaaaaaaaaaagcagtggctgggtgcagtggtgcatgcctgtaatcccaacactttggcctgggagttccagaccagcctgggcaacatagtgagatcccttgtttacaaaacaaaacaaaacaaaaacaaaaaccttttctaattaaaaatagctgggcatggccaggcacagtggtggctcactcctgtaatcccagcactttgggaggctgaggcaaatcacctgcggtcgggatttcgggaccagcctggccaacatgacaaaaccccgtctctacaaaaaatacaaaaattagccaggcctggtggcaggtgcctgtgtggggaaaagaaaaagagagatcagactgttactgtgtctatgtagaaaagcaagatataagaaactccattttgatctgtactaagaaaaaattgtttctgctttgagatgctgttaacctgtaactttagccacaaccctgtgctcacagaaacatgtgctgtaaggaatcaaagtttaatggatttagggctgtgcaggatgtgccttgttaacaatatgtttgcaggcagtatgcttggtaaaagtcatcgccattctccattctctattaaccaggggcacaatgcactgcagaaagccgcagggacgtctgcccaagaaagcctgggtattgtccagggtttcccccgactgagacagcctgggatatggcctcatgggaagggaaagacctgactgtccctcagcctgacacctgtaaagggtctgtgctgaggaggagtagtgagagagggaggcctctttgcagttgagataagaggaaggcttctgtctcctgctcgtccctgggaatggaatgtctcgatgtaaagctgaccattcccattcgttctattctgagctaggacaaaacctccctgtggctggaggcgagatatgctggcagcaatactgctctgttgccctttgctacactgagatgtttgggtaaagagaaacataaatctagcctactgcacatccaggcacagtacctttccttgaacttactcatgatacagattcctttgctcacatgtttccctgctgaccttctcctcacctgttgccctgctacactcccctcgctaagatagtaaaaataatgatcaataaatactgagggaactcagaggctggcgccagtacaggtcctccgtatgctgagcgccggtcccctgggcccactgttctctctctatactttgtctctgtgtcttatttcttttctcagtctctcgtcccacctgacgagaaatacccataggtgtggaggggctggtccccttcatgcctgtaatcccagttaccgaggaggctgaggcaggaggattgcttgaatctgggaggcagagattgcagtgagctgagatcatgccactgcactccaccctggggacagagtaagattctgtcttaaaaaaaaaatagctgggcatggtggtgcatgcctgtggtcctagctactcgggaggctgaggtgggaggatcgattgagctcaggagtctgaggctacagtgagacataatcacaccactacattccagcctgcgagacagagcaaggtctcaaatctttaaaaatattttttttttttagaaaaagtttgagccaggcgcaatggttcacacttgtaatcccaacagtttcggaggctgaggcaggcgaatcacctgaggtcgggagttcaagcccaggctggccaacatagtgaaaccccatctctactaaaaatacaaaaacttagctgggcatgttggcacacacctgtaatcccagctacttgggaggctgagacaggagaattgcttgaacctgggaggtggaggttgcagtgagctgagattgtgccattgcactccagcctgggcaatagagcaagactgtcacacacacaaaaaaaatagaatagaaaaaaaatgagtaagtaacgtttggtaaagcttgtttcatgaacatgtttttctttatacacataggttgtttatgaaatatgtaggtaggtttatagctccataaacaggcatccctcagaatataaacctaatctattcccaaaaaagtagtatatagaaactttggggataaaccactatttatttatttatttatttttttgagacgaagtttcgctcctgtttcccaggctggagtataatggcatgatctcagctcactgcagcctctgtctcccgggttcaagcgattctcatgcctcagcctaccaagtagctgagattacacgtgcacggcactaacccagataatttttgtatttttagtagaaacagggttttaccacgttggccaggctggcctcaaattcgtgactccaggtgatccatccgcttcacctcccaaagtgctgggattacaggaatgagccacctgcccagctttaatttatttctttatttgagacggagtgttgctctgtcgccaggctggagtgcagtggcgtgatctcggctcactgcaacctccacttcccaggttcaattgattcttctgcctcagcctcctgagtagctgggactacaggcgctttccactacgcccggctgatttttgtatttttacatccatgttggccaggatggtctccatctcttgacattgtgatccacccgcctcagcctcccaaagtgctgggattacaggcatgagccactgcacccagccccggcttttattttaagcagagaaaataatgcactcccagcttcatccaaaaacgctaaacaatttcctagaatatcaataaaagactcttaaacacctacataacagcctaccacggattatggcatagtagaaagcatttaaaataccaattgcctaattattcaacacttaaactcatgaatgattatgtttgtgtacaatacaaaagtattctgcacagaatcagatataaattatattttccttccgcagtgcaatgatcatggggtataactaaacaaacaaacaaacaaaaagatactaaagataccgtctataattggacccaggtcagtggtgcctccaggcacctggccaaagtcaacacagggggtttggaagcggaagataatatcaacaatggctaacacattcaacgcacaaaacagaatcctgttagaacaggtgagaagtagggctgggtgcagtggctcagacctgtaattctagcactttgggaagccaaagtgggaggatcacttgagtccaggagtttgagaccagtctgggcaacatagtgagaccccgtctctacaaataaaaattagcggccgggcgtggtggctcatgcctgtaatcccagcactttgggaggccaaagcaggcagatcacctgaggtcgggagtttgaggccagcctgaccaacatggagaaatcctgtgtctactaaaaatacaaaattagcctggcatggtggctcatgcctgtaattccagctactcaggagggtgaggcaggagaatcacttgaacccgggaggcagaggttgcggtgagccaagatcgcgccattgcactccagcctgggtgacaagagcaaaactccgtctcaaaataatgataataataataataatatttagttgggtgtggtggtgtgcacctgtagttccagccactcaggatgctgaggcaggaaaactgctaaggtccgggaagttgaggctgcagtaagccatgatagcaccactgcactcagcttgagcaacagagaccctgtctcaaaagaacaggtgagatacaacagcagcatagtacttttttctggggggggggcggtgagacagagtctcactctatcgcccaggctggagtgcagtggcatgatttccagtcactgcaacctctgcctcccgggttcaagcgattctcctgcctcagcctcccaagtagctaggattacaggtgcccaccaccacacccagctaatttttgtatttttagtagagatgaggtttccccatatgggtcaggctggtctcgaacccctgacctcaggtgacctacccgcctcagtctcccaaagtgctcggattataggtgtgagccaccgcgcccggccagcatagtccatattctgaacttacacaggatgtaaaacagttgcagagtgggtttttatccaaatagctattttggggtttcaaggaaataaaataattcttgggacaatttggatagtgagagttgggatatgaagggatgctgcattcctaagtaggtggtcacaaaggaaaataaattgttaccatgcgttgtgcagatttttgttgttgttgctcttgagagagtcttgctctgttgcccaggttcgagtgcagtggcgcaatcttggctcactgcaacctccacttcttgggttcaagcgattctccttgtgcagatttttttaagagatagggtctcaatctgttgctcaggctggagtgcagtcacataatcatagctcactgcagccttgaacccttgagctcaagtgattctctcgccgcctcagcctcttgagtagtggaaactccagatacgtaccaaccaccacacccagattgtagaaaaaatttaactggaaggcacacagggcaaaatgcatgtgatttgtgtacaggttcgttaactttcccaaatgcatccatctgtggaatcatcacccaaatcaaggtaagatatttgctttatcatagaaggttcttttgtgctcccttctgatcaatatgctattttttttttcttttgagatggagtcttgctctgtcacccaggctggagtgcagtggcacaatctcggctcactgcaagctccgccccctgggttcaccacattctcctgcctcagcctccagagtagctaggattacaggcgcccgccaccatgccctgctaattttttgtatttttagtagagatggggtttcaccatattagccaggatggtctcgatctcctgacctcatgatccgcccacctcggcctcccaaagtgctaggattacaggcatgaagccaccgtgcctggccccatattcattctcaaaggtcaccactgttctgatttcccaccataggccagttgagcatgttctagccctcctctaaatggaactatacagtatttaccgtctctggcttctttatctcaacaaattatctgaaatgcatttctgttgcagtgtaggtcgatatcgctcttatttattgctgagtaatcttccattgtatgaatgtaccagtgtatccaattgatttgttcccaaattttggcaatgatgagtacagcagctaaacgtttgtggacacatttttgtaaaagcaaaagttttcacttctcttgggtaaatacccaggagtgcaactcctaagctgcatagtaaataaatatatattatatatatatatatttttttttttttttgagacagagttttgcttttgtcacccagactggagtgcaatggtgagatcttggctcactgcaacattctgcctcctgggttcaagcgattctcctgcctcagcctcccaagtagctgggactacaggcatgtgccaccacgcccggctaatttttgtatttttagtggagacggggtttcaccatgttggccaggctggtctcgaactcctgacctcaggtgatccatccacctcggcctcccaaagtgttgggattacaggcgtgagccactgcacccagcctgtattttttaactttattaagaaactgcccagttattttccaaaacaactcagccatctactaagggagcaccaaccaagagatgaggagtcctgttgtatcccatcctcccttggtcttgtattcagccattctactgtgtatagtggtgtctcattgtggtttcccgtggtgtttaagagacagggtctggctgggcgtggtggctcacgcctgtaataccagcactttgggaggccaaggtgggtggatcacttgaggcaccggtctctactaaaaatacaaaaattagctgggcatggtggcagatacctgtagtcccagctacttcggaggctgaggcaggagaatcgcttgaacctgggaggcggaggttgcagtgagccaagatcgtgccactgcactgcactccagcccagacaacagagccagactccgtttcaaaaaaaaaaaaaaaaaaaagcgacagggtctcactctgttgcccaggctggagtgcagtggcatgatcatgggtcactgcatccttaaactcctgggctcaaggaatcctccccaccgcagacttctgagtagctgggactgcaggtgtgcaccactgcacctgcctaattttttgtgttgtttttgagacagagttttgctctttcacccgggctagagtgcagtggtgcgatctcggctcactgcaacctctgcctcccgggttcaagcaattctcctacctcagcctcctgagtagctgggactacaggcgcccaccaccatgtctggctaatttttatatttttagtagagacagggtttcaccatgttggccaggctgatcttgaactcctgacctcgtgattcgcccgcctcggcctcccaaagtgctgggattacaggtgtgagccaccgtgctcggccttaatttttgtatttttttgtagagacgatgtctcactatgttgcccaggcttgtcttgaactcctggcctggagtgatctcaaagtgctgggattacaggtgtgagcccccatgcccagcccagtggtgtttcttgatgagcagatactgtcattgcagtggccagtgctttaagtcaaattctcaagaacacctgattaaatagttgacactcaattttattgctaaaaaaaatgtcctctggagtgacagcaggtatttgtcctcagcctctccccagagtccctgggagtgtttctgttattgtggagggaataggggatctggggacagggtgggacgtaccatggggacaggaggtcacagaacacacacacacacacacacacacacacacacacacacgtgcacacacacatccccccacaactacagccgccaaaataaccagcatggtgttgtaacatccccccagtgggggctagaattccccatggtgacctgtgacctgctccctgagacaggggaggccaggcaggtcacggtggggacgcagcagaacattatttctccatcttgctgttttctagccttgagttggggacatgagtgagaactgggggttttgaggagtaacccttgtgaacacatgtactccagcagccaggcatcccagatctcctgtcctggagggtgctggggcccctggctccccagagtgtgcaggcagacccccagagccctagctcatccatttatccattcctcataatccagtgtccaaagagcacccccagcagggcagggaaggtccctcccggggtttacatgactgattccttctcagaggcgaccgtggcatcccctgcgggcccccgatagtgtttgaggagggggtttccttcctcagtggggactggcagcggatccaggggcagctcactcttcacttgtatcaactcaggctctgtgcttctcgactccgtacggtccacgtaattttggaggagtcctgcccccagagcgtcaccttctacattgaggacggtacaggaccggtcgctaaaggggtagaaatgacagcaaagtaagcgggaggggagagggtgagagggaaggaaagggccaaggcctaagcctcctgcctctctccccctggaatctaaaaagtaaaaattaagagttggagtcagcctgggcaacatagtgagatcccatctttatatatatttaaaaaaaaaaaaaattagccaggcatggtagtgcacacctatagtcccagctactcaggaggctggggcaggaggatcgctggagcctgggaggtggaggctgcagtgatcacaaccatgatcacatcactacactccagcctgggtgacagagccagactgtgtctcgaaaaaaaattataattcacctaccataaaattaaccttttaaaagtgtccatcttggtattttttagtatattcagacttgtgcaaccattgccaataattaattccagaatttttttttttttttttttttgagacaggatctcactctgttgcccaggctggagtgcagtggcacaatctcggctcactgcaacctccacctcccaagttcaagcgattctcctgcctcagcctcctgagtagctgagatcacaggacaggcgtacaccaccatacccggctaatttttttgtatttttagtggagatggggtttcaccatgttggtcaggcttgtctcaaactcctaacctcaaataatccacctgcctgggcctcccaaaatgttgggattacaggtgtgagccaccgtgcctggctgctttccaatctttatactcttaatagcttaatcgtgatagcaaataattatgtagcaattactgcttactgggggctgctctaagggaggtgtgtctgttatctaatccttagggagagactgttcttctccccgttttacagatggagaaactgagacgcaggaagattaagcacttcccgaggtcacaacagtgaatgttggagctgggatgtgaacctgagcagtctggctgaagagtctgctgtattcaccacacagacgctctacttttctgacatccctcttagagccacaaagatgccattccttgccctcaggaatgctcaaggttccccccatttcctccagaattccttccttcttctcttcctcttctgtccagaggctctaaggactctcactcactcatcctctttcccaggggtacccctggccctgccccagtctccagacccacactcacactagccagtccacagccaggatcaaggagatatggtcgaccgggaggttgactgcttcgaggatgatggccagagtgaggacacctccagcagggatgcccgctgcccccacgctggacgctgtggccgtgaccctgagggagaaggtgggaggttaggcagatgcctgtcttgtgggagaagatgggggtcaacaggggtccgggggtcccatccgcagccccctgacactcacaggatggtgatgatctttacgaagtccaaggactgctggctgagctgtgcaatgaacactgcggccacgcactggaagagcgcggcaccgtccatgttgacggtggcgccgatgggcaggatgaaacggctgatgtgcttggccacgccattattctcctccacgcacttcatcatcagcggcagcgtggcggaactgcaagggatgggggagctgagttaggttaacctgctgaccggggctccgcccaccctccaggtccagcccaggtgaggcctcgcctaccccaccccaaccagccaaagccccacccaccccacccagtggatccccaccagagcctgcctaagcaaagccctgtcacccaaccaccctccaggtctgacctgcaccacccacccagttgaagccccgcccacccagagcccacccacaccacctgcccagccaaagccccgcccacccagatcccgcccataccacttgcccagccaaagccccgcccaccagatcctgcccataccacctgcccagccgaagtcccacccacgtccccagtctgtcccttggcccaaggcccccacatctaacctagaccccccttccctcctaccatgtcctgactccacccccagccctcacttgctatatctaagctcttttcccacaagcaggcagcactagggaactcaataccaggattacaaaatccatgagtcctggaacccctgggagagtatagactactacctcccaaaatacccacacaattcacacctaaattctactgtctgggtcctgctgactctcaccaataatacactaagaattactattgtcttgggaggggacagggccagcagggatgaatgaaatgcccaggagagacggtggaaggagttctgaggttgaatcagagcagaacttaagagccccccaggggcatggcagctcacacctataatcccagcacttttggaggccaaggtgggcggatcacttgaggccaggagtttgagaccagcctggccaacatggcgaaaccccgtctctactaaaaacacaaaaattagctgggtatggtgggggacacttgcagtcccagctactcgggaggctgaggcagagaatcacttgaacccaggaggcagaggttgcagtgagctgagatcacaccactacactccagcctgggcaacagagcgagacgccattgtttaaaacaaaagaaaaaaaagagtgcctccagggccacggggaggcagtgtaagaaagagggaaataaatctctagggcaatcatttcctatctttttaagggtggggataaatccaggaccttatgagaatctcctgaagtatggcccctgtacccagatacaatgtcccgggcagagaaaatttcatccgctccatgccgcttagcggattaaacatcccaccctagcccaccccaaggccgtacctggaagaggtcccaaaggcagtggccagcggcgtcacgatgccccacaggaagcggtaggggtttttgcgggtgaagaggaagtagatgaggggcagtaccaggagcccatggatggcgtgacccagcaggcagcacagaatgtacttgccaaggcgggcaaagagtaaacccacatcctccatctccacgatcttgccagccaccaggaacatgatgcccacaggggcgtacctgatcagtaacacaggagacagcttgttgcctcttccacgggcccagtggccaggcgtgaggctcagcaccctacccacatcttcctgccttcctgaggtcaggagaagccccagcaatgtgtgcttcagcatgggcaccactcccaggcctggcccctgaagcccccatgccaatctcatgctctctttcccctcaaaggtagagcagcccggagataaaactctccgtgcaggccgggcacggtggctcatgcctgtaatcccagcactttgggaggctgaggtgggtggatcacctgaggtcgggagttcaagaccagcctgaccaacatggagaaaccccgtctctactaaaaatacaaaattaaccaggcgtggtggcgcatgcctgcaatcccagctacttgggaggctcaggcaggagaattgcttgaatcagggaggcagaggttgctgtgagccaagatcatgccattgcactccagcctgggcaacaagagtgaaactccatctcaaaaaaaaaaaaaaaaaaaaagtctcagtgcttccatcaccatgtgaagcagtcaccagatttggacttcacatgggagacagaaagaaatgtccatcaaggtgcgccattcacacttcctgggttggtttgctatggcagctagcatgacttgagccaatacgctctctgcagatgatgaaagataaagaggctgggcacagtggctcatgcctataatcccagcactttaggaggtgaaagcaggaggattacttgaggccaggagttctcgagaccagcttgggcaacacagcgagacccagtctctacaaaaaataaaaataggccaggcacggtggctcatacctgtaatcccagcatgcagggaggtgaaggcagacagatcgcttgagcccaggagttcaagaccagcctgggcaacatgtctctctttttttttttttgagatggagtctcactctgttgcccaggctggagtgcagtggcatgatctcggctcactgcaccctccgcctcccaggttcaagcgattctcctgcctcagcctcccaagtagctgggactataggcgcgtgctaccacgcccagctaattttttgtatttttagtagagacagggtttttctgtgttagccaggatggtctcgatctcctgacctcgtgatctgcctgcctcagcctcccaaagtgctgggattataggcatgagcctccgtactgggccacccagtttcttaaacaacaacaacaaaaaaaatgagctaggctttgtggctggggtctgtagtcccagccacttaggaggttgaggtgggaggatcacctgaacccaggaggtccgggctgcagtgagctgtgatcatgccacactgcactccaacctaggcaacagagcgagatcctagttcaaaaaacgtttttttaaattactattattattattatttagacagtctcgttctgttgcccaggctggagtgtactgttgcaatcttggctcactacaacctttgcctcccaggttcaagcgattttcatgcctcagcctcctgagtagtagctaggattaaaggtgtacaccaccattcccagctaatatttgtatttttttgtagagagggtttttcgccatgttgaccaggctagtctctaactcctggcctcaagcaatcctcccccctcagcctcccaaagtgctgggattacaggtgtgaggtaccacaaccagccaaaacacacatttttaaaataaaaatttgaaggccaggagcggtggctcacacctgtaatcccagcactttgggaggccgaagagggcggatcgcttgaggtcaggagtttgagaccagcctggccaacatggcaaaaccctgtctctactaaaaatacaaaaattagctgggtatggtggttcgtgcctttggtcccagctgctcaggaggctgaggcaggagaatcacttgaacatgggaggcagacattgcagtgagctgagactgtgccactgcacctccagcctgggcgacagagcaagactctgtctctaaataaataaataaataaaataaatacaaattttagaaagaccatggcctgggtcttaataacaactcccaggtatgaagcatttgcgatgtgctctgcccttgaacatgatgttgaatcttcccagcaacccccggagggaggtcctatgagtcagattgcagattacacaacacccaatagattcctcacgggaatgctgggaggatgcaatgagatgccagttgaaaggagctaaagctttttacagacaataagtgatctgtaaacttcaggtgggtttattatcaccctctcctgctgtgaagatcccagggatggctccaagccaagaggactcccaagtccgggcgcggtggctcacgcctgtaatcccagcacttcgggaggccgaggtgggcggatcacctgaggtcgggagtttgagaccagcctgaccaacatggagaaaccccgtctctactaaaaatacaaaattagccgggcatggtggcgcatgcctgtaatcccagctactcgggagactgaagcaggagaatctcttgaacccgggaggcggagtttgcagtgagctgagatcacgtcattgcactccagcctgggcaacaagaacgaaactccatctcaaaaaaataaaataaaataaaagcctcccaacatcacttccctagactactcgatcatcggtcgcccatccatcatcactgactagttatctccccagtcccttcttgtaagtcacagaagaaaggcatattttcccagccacttgtgcagagaagggaggctagatacccaagttctggccagtgggaagtatccagaagttatacaagcaaaaagcccaataaatattagctactaggatttactgtaggcacgcaataagccaggcactgtcctaagaccttccgtgtaccgtattcactttcttttcttttcttcttgagacagagtttccctctgtcgcccaggcagtggcatgatctccgcttactgcaacttccgcctcccaggcttaagtgattctcatacctcaggttcccgagtaactgggattacaggtgcgtgtccccatgcctggctaattttttcgtatttttagtagagatggggtttcaccatgttggccaggctggttttgaactcctgatctcaagtgatccacccacctcctcccaaagtgccgttcccattttatagatgaggaaactgaagcagagaaggaaaatcacttgcctaaaatcacatagacagggaatggtcaatgctggatttaaatgcaggtcatctggctccaaagagtgaatagagggtgccccatcccaaacagaatgccccgcacctgcctctggcagcagaccgaccctccaaccccacccacccccagcctcctctcccaccacctaccacatgatccaggagaccagaaccatggtggcctcattgaaggagttgaagaagcggataagcagctccccttcaggccccagcttccgcagcgccacaccaaagacgatggcaaacactaccaagcccaggatgttcatcccctccacctcctgccccacgggcacctgtgggcaaggaacagatcggggtggaaaggacactcagtctacctgcacagtcactgagggcctgtccttggcaccactgggacccagcagagacaaggcagccctcagaccccttcctcccaaggctcccagtccaggtccaggggaaatatattagtcgtcagggatggcccagagtaggtggggctggaataagggagtccaggggagtgtgggaaccaagagagggcagtgccagcttggggagtagggggcagtcaggggggacttcctggaggaaggagcatctgagctgagacctggaggacaagaggagtgaaccaggtaaagaagggtggtagaaagatctacagagaggaagcagaatgtgcaacagcctagaaatgagtgcaacttgggcattcaaagaagagccataatctactgtggctagagtagaataatctgggcagggtcactagttaaggatgggcagccaggcgggctggcaggggtttgacctcacagggagcccttggtcatagactgtagcaaggagactggactttctcctgaaggcactgaggcacatggcagggctctgggtactgcagagatagggtcacatttgtgttttgaaaagatcctcgggcggagcacggtggctcacgcctgtaatcacagcactttgggaggctaaggtgggcagatcacctgaggtggggagttccagaccacactgaccaacatggagaaaccccatctctactaaaaatacaaaattagccgggcatggtggcacatgcctgtaatcccagctactcaggaggctgaggcaagagaataatcacttgaacccgggaggcggaggttgcagtgaaccgagatcacgccattgcattccagcctggacaacaagtacaaaattctgtctcaaaaaaaaaaaaaaaaaagaaagaaagaaaagaaaagatactcagggccaggagcagtgcctcacgcctgtaatcccagcactttgcgaggcggccaaggtgggcagatcacttgagcccgagagtgcaagaccagcctgggcaacatggcaaaactcagtctctataaaagatacagaaattagccaggtgtgttatagtcacagctactgggaaggctgaggtgagaaggatcacttgagcccaggaggtggagactgcagtgagctgtgatcgtgccaccgtactccagcctgaatgatggagagagatcctgtgtcagaaaaacaacaacaaaaacctctggctggctgccagtttgagcaggttgagggtggatggaagggggcagggagagggcagcatggaatggggttggggggtgagggagaaaggaagagcctgggcacctggggtgggaaaagaggggacaaagtagagacctatccagaaggcagaaaagacagaaattggggaaggactgcagagtgtcaatcaaattccacagcaaagactaaggcagaaataaaaccaaaaaattatagcaataggcaaagaggtagagcccccgctgcctcccactgctctcaccttcaccctggttccggtgatattcctctcttcataggtggtagagtactgtaggtggggttgggaagagtcagtgtccatcgttaccagggcctcccaaccccatgccaagctaacaatgctcaaagcctgcccttccacatcctttcaatgtgatctcatttcatctgctggcaaccccatggggcaggatgatcaatacccccattttccagaggtggaaaaccgaggctcagagaggtaaacacatttacccagagtcacacagctagaattaaaactcacaggaggctctgagcccgtattctcattgacatgcatttttccaggaactaaccaaaatcaggtagcaagggctccccctggctggcatccctccctgtccacccccatcccctcaggacacccctgaggactcactgagcgaaaggctgctgacaccaggttggaagggaagatatttctgcagagacagacacacagagggttattagataccatagtgggagggcagcattgtctgagaggctgggttggcgttttaaggcagcgagtggaagctttgggggcccgcctgcacgcaaatacagcccctactcatgcctcagcccggcagggttggaactaggcttgcacccctttgcaggacttggggagtcagcctccttcagccccaagaggctggcgtgctagccctgaggcattgtgggttcggggtgaggaatgctggcctcccacggcaggccagggcaggtcgccccgggcctcagctccaccccatgcagcaaacttaataccctggacagcttgcatcagccacttcctcctggagggcctgccagcggctctgagagtatgggggaggatctgggtgtgttgggaggcggtggcggggagggagaaaagggacggcttcatatctcatgaatatgcatctgtgtttacaaggctacccttactcttgtgtgacagtgtctgccttaagatgaaaatagtagctaaggccaaggcgccatggctcttgcctggaatcccagcactttgggaggccaaggcagacagatcgcttgagccaggagttgaagaccaacctgggcaacatgacgaaaccgtgtctctacaaaaaatacaaaaattagccaggcatggtggcatgtgcctgtagttccagctactctggaggctgaggtgggaggatcactcaagcccgaggaggttgaggctgcagtgaaccaagatcaagccactgcattccagcctgggaccgagtgagactctctcaaaaaatatatatagcagctaagccatctacagcacctaccgtgtggcaggcaggcattttggcctgtgcttgacacaaattaacccatttcatcctcacgacagccttggggataatcactattaccccattttacagaaaaggaagctgaggcccagaagggtaaagaaaattgcccagctgggaaatagcagagctgggatttgaacccagccagctggctccatagccccaagcactccacatgctccctctcaccaatgactggtgtacagccaacgccatgtgcccatatacaatctgtcaaatgttaatagtttgggtgcaggttaaggttcagtagtatgggacagtgtccatggatggccacccatgcatcacggtacagtaaaataacgtcatggtagaggaatgagtttggccgggtgcggtggctcacgccagtaattccagccttttgggaggctgaggtgggcagataacttgaggtcaggggttcgagaccagcctggccaacatggcaaaaccccgtctctactaaaaacacaaaaattatccaggcgtggtggcacacggaaggctgaggcacgagaatcacttaaatccaggaggtagaggttgcaatgagccaagatcgcaccactgcactccagcctgagcaacagagactgtctcaaaaaaaaaaaaaaaaagcatgagtttattggtgtgtgaccacataggtgtgtatgtgagtgtgtattgtgtgctcttgagcctgtgtttagatgttggcgtggctggtggcatcactgaatggctgtgctacaggggtcttagtacacagtgagcgtgtgtatgaccgctggtatctggccatgtgtttgtcgagatgctacagcctcagctgagtgtctgcgtgaatgtgtccagctgtatgtcatttggttataagcctgtgtggcaggccaagtgtgagctacagctgttttggcacgcaggggaggcctgtgctcataaacagcctcggagtgggtgtgcctgcctgaaggtccgcctgtaccacccaggcccaggctgggccaggacccagctaatctcccccagccagaaggtgctcccaggcttcaactcgggacaccaagcctgccccagtctcgcatctcagcctgcactgacgccccagaggctggagaaccctgttccgtgactcatcatttccttcccccaacttccaggaagtccccaacgtggagacactgaatgagcaagccctaaaggcaagcgcaagggggcctctgccccccgccctcctcaaagtgggggaggccattcttgggggcgcggggcagaggccaggagaaggaaaagaatctgctcccctttctaactggtcctcttctgggctgcctgctagggggtggcccagacagaggaggaaacgggagggaaaggcaggggtggcagggctgatctaaaagataaaggggaagcggccagaccccagctgaaatgggcgggaagcggaggccaaaaacagagcctggttatgtccgagtgacacgtggtgtgggggtgccccagggctgggaagagggcctggtgggagttactcagatctcagatcctccaggggctccttacccaaactctccaaccctggccccaaattatatctagaagccccatcttggggcccttgaccacgcaaagattccccccgcaaaagttcctcctggggtcccctcccctcagtgtctttctcccctaggcagaccctcctatgtctccccaaatcactttcttctccctctataagaccccacttatgtacccaggcccccagatttagaaaccccttccccaggagactagactcacactcccgagggctggagcctcccctcaatatcctgtcgagttttcctaagactctagagggaagtctctgctccaggggccccaaagccccgtcctgtccacgtgaccactcccgccatccgtaacactcttccccacctcccgggggagcgggagctgacctcgcaagatccaggaacgaatcgagcacctccttgctgggggcattttcggcactgcccgcggctcccacggaggcgttgatggcggcggaggcggcgcccggctgcagagccagcgccaagcccactccgagcgccgacgccagcagcgtggtgaccaggaaaaagagcagcgcccaggcgcccagacggccgagcgcgccggggtccaggctggcggcgccgccgatcaagctgcacaccaccagcggcaagatgatcatccgcagcagacgcagcagcagctcgcccgggaagacgaaggcgctcaagcgctccgggcccaacgccagcgcacccccggcccccgacacccccagtcccagcgccacgccggccaccacggccaccactgtcagcagcacaagcaggttggctcgaaggcagcggcgcacctggtcccgggaaccgcagtagccgcctgctgccgcgccttggtcctcgatggaggccagcgccaggcccccgttggcggtgggctccgccgctgcgagccccttggagtctcgaggaggatcggccaccatgatgggaagcaccggggtttcttagcgcctggaagctggctgggagcgcttgggctccttcccaggacccgacgttcctaggactgagttgagtaacagcacctggagactggaactttggagggctccttagagttgtgagttcacagcactgaagttccttggctcttggaagctggagtgtttaaattccccaggctgggcgctgaggcttctctgctctgccccgtgtgccagatgtccgaaagctgggagttcggagcgcccgggttccttggccctaggagctgggaatacgagagtttctctgggtgggacgtggggcccttggctccaggaggttgagtgcccccagatggcggaggtctgcaggaggctaggttctggtggcgcagatcccggacgcctggatccgggaggcggggacccgggctgcctgggtcttggacactgagggctgggatgccagaatctgggggccgggaagcggacctccggaaacaggggacccaggctcttaggtccgggagggtgggatgcgggcccctgtgtacggaaggcggtggtctggtgtccgggagtagcggttaccagccagagaaagcctcccgggcgtgccgcgtggctctgagcccgtttagcggaagctgccagggataagggtagggggcggggcttgagaaggcggggaccgaccctcgggcgccgattggctgcagagcgttcggagactggacgagtaggggcggggctgatacccgagatgggccaggtcccccatagaaggcagattaataatacccatctccaggagccgggcccagagacgacggggcggggccaggaaggggcggggccttgggagggtgctgtttcccgccaaaggaactgggttgtgggttggagcccttaaaccacaggggttcgttccctggtgcgagggtcgctagaaagctccggtggtcctcggtgattcatttgcaactcaactcagctttggaactcctcagccctgagtttggtctttagtcgcctctgagaactttaattcctcgaatataaagtgcaggtgttaaaagcttttgtctcatatgattgctgtaagatttaaataaaattgatgtatttatttagggagccgtggctcaagcctgtaatcccaccactttgggaggtgaagcgggcggatcacttgaggtcaggaggtcgagaccagcctggccaacatggtgaaacccgtctctactaaaaatacaaaaattacctggtgtggtggcacgtgcctgtaatcccagctactggaagcctgaggcaggagaatcgcttgaaccccagaggcagaggaagtcattcaccttgaggccacacctagagaggatgacacgtgcatgcccacctcccaagcccctaaccgcacccactctgctgcctccccaaattctctgttagtggccgtttgggaggttaacaatgaattatgattccttactccacctgacagtgttgaaatcctcattcctttcccatctctagcctgttctgtgacatttcaggctttcatgcttgctcaaagattgtagtggtaatgtcagaagcttcctcctacagcagctgtgaggcctcaggtaatttacaacctctatgaggctcagtcttcatatgtgtaaatgggaataataataagtcataccgccttgagtgttgcaagggttcaaatgagataatacggccgggcgcagtggctcacgcctgttatcccaccactttgggagttgatgcgggcagatcacttgaggtcaggagttccagacgagcctggccaacatggcaaaaccctgtctctgctgaaaatgcaaaaattagctgggtgtggtggcacatgcctgtaatcccagctactcaggaggctgaggcagaagaattgcttgaatccaggaggcagaggttgcgaagagccgagatctcaccactgcactccagcctgggtgacagagtgagactccacctcaaaaaaaaaaaagttatttatttgtgctttaaaattttttgttctttctctcttcttttgtttctaacaaaaatgcccttcagaagaaagtcaaatactactgctgcgattgctgttattgttattattactgaagaacaagctggattcagtggcatgcacctgtagtcccaggtatttgggaggctaaagcaggaggatcccttgaggccaggagttcaaggctgcagtgagctatgatcgtgcccacatttagccactagactccatccggggcaacatagtgagaccttatctttaaaaacatgaaaataggccaggcatggtggctcatgtctgtaatctcagcactttgggaggccagagtgggcagatcatgaggtcaggagatcgagaccatcctggccaatatggtgaaactctgtctctactaaaaatacaaaaattagttgggcatggtggcatgcacttgtagtcccagctactcaggaggctgaggcaggagaatcgcttgaacccgggaggtggaggttgcagtgagccaagatcacacctctgcactccagcctagtgacagagtgagactccgtctcaaaataaataaataaatattttaaaaaatttttcggccgggcatggtggctcacgcctgtaatcccagcactttgggaggccgaggcgggtggatcacaaggtcaggagatcgagaccatcctggctaacacggtgaaaccccgtctctactaaaaatacaaaaaatcagccaggcatgatggcgggcgcctgtagtcccagctactcgggaggctgaggcaggagaatggtgtgaacccgggaggcggagcttgcagtgagccgagatcacgccactgcactccagcctgggcgacagagcgagactccgtctcaaaaaaaaaaaaaaaaaaaatttcacagtggcttacacccttaatcccagcactttgggaggccaaggtgggaggctcacttgagcccaggaatttgagaccagcctgggcaacatggcgagactccgtctctacaaaaaaattaaaaaataagctgagtgtggtggtatgcgccaatagtcccagctacttaggagggtgaggcgggaggatcgcttgagccaggaggtcaaggctacagtgagctgtaatctcaccactgcactccagcttaggtgacagagcaagactcagtctaaagggaaaaaagatttaggctgggagcggtggctcacgcctgtaatcccatcactatgggaggccaaggcaggtggatcacttgaggtcaggagttcaagaccagcctggccaacatggtgaaaccccatctctactaaaaatacaaaaacatgaaaataggccaggcacagtgtctcatgcctgtaatcccagcactttgggaggcctaagtgggcagatcatgaggtcaggagatggagaccatcctggccaatatggtgaaaccctgtctctactaaaaatacaaaaattagttgggcgtggtggcgggcggctgtagtcccagctacttgggaggctgaggcaggagaactgcttgaacccaggcgtcagaggttgcagtgagcggagatcacaccactgcactccagcctgggcaacagagtgagactctgtatcaaaaaaaaaaacaaaaaaacaaaaaattccttggctgctagagcttgcattctagtgcagagagacaagacaataaacttgggcttggccgggtgcagtggcttacacctgtaatcccagcagtttgggaggccgaggcgggcggatcacttgaggtcaggagttcaaaaccagcctggccgacatggtgaaaccccatctctactaaaaatactaaaaaattagccgggtgtggtggtccacgcctgtaatcccagatactcgggaggctgaggcaggagaatcgcttgaacctgggaggcagaagttgcagtgagctgagatctcaccattgcactccagcctgggcaacagagccagactctgtatcacacacacacacacacacacacacacacacacaaaatccttggctgctagagcgtgcattctagtgcggaagagacaagacaataaacttgggctgtcagctggaactaagcgttgggagaaagcaaaagcatcctatgagtgacagagtgaacagttcagccactggaaggaagtgacatctgcactgagatctgaaagataagaaggagcccatggcataatgtggaaacattcaaaggacgcgtgtgaagccctgaggcaacagagaggtttccatctctgttagcagtgctcacagacatggttttatccccactaatccaggagaccagctcacactcccattttcctgatttggaagcagataagggtaatgaggcttgctgtggcccaaaccccaggcataagcaagaaatctgaactcagatgtttctgatccttgtctgcatctcctatcagacaccctggctacccctgcactcggctgtctccaactagacatttccttcaagggacagtcatgtattctgagcccagtgttgggtcctgcgatgggtgataccagggacccagtggcgaacaagacagttctggccccgttctgctgggactcaaagttcagggggggacacagatagtgatgatacagagtgggcagggctgggatgggggagcccagaagggatgcttgaccaggcttgggggtcagggagagcttcctggaggaggaggcatcggagctgggatatgaaggagttggaccaatcccagggaaagaatattccagacaaagagaatagcacatgcaaaatcccagacttctggccaggcatggtggctcacgcctgtaatcccagcactttgggagactaatgcgggtagattgctggagaccaggaattccagaccagcctggccaacatggcaaaaccctgtctcttctgaaaataaaaagtaaaaaaaatagccaggactaatggcacacgcctgtaatcccagctattctggaggctgaggcaggagaatcacttgaacccagaaggcagaggttacggtgagccaagattgcaccactgcactccagcctgggcaataaagcaagactctgtctaaaaaaaaaaaaaaaaaaaaaatcccagacttcagaagagtctggaatatttcaaagcacagatctaactgggccacccctactctctgaacagccccagtggcctccctcaggatgaaaaccactcttcagctaggcatctgtccgcttggtgattcatttattcattcattcaacaaaccacatccacagaatagaagactgagagacatcaaatagaaggagacggatgcccatgagctgacatgggatcgttgtgatgactcatctggccaatatttatcaaacactgagaaaaacagatgaggagccgggagcagtggctcactcctggaatcccagcactttggaaggttgaggtgggtggatctctcaaggccaggaattcaaaaccagcctggccaacatggtgaaacctcatctcaactaaaaatacaaaaattagcggggcgtggtgctacctacccgtaatcccagctactcgagtggctgagacaggagaatcacttgaacctaagaggcagaggttgcagtgaaccaagattgcaccactgcactccagcctgggcgacaaagcatgaaaagaaaaaaaggcaaagaaaaacagatgagaaaaacacgagcaaaacagatgaaaatcccttctctgctagcactgatattctagcagcaggacacggtcaataaatactaaacataatatgcatgtaggctaagtgggttatctggcttgtaacttattgtcacaaagcagaaagtgctgtggagggaaatatatatgtatgtatgcatgcattaggaaaagtgaggaattagatgaatgaagggtaaattgcaataataaatcaggctgggatcagtggttcacaactataattcgaacacttttggaggccaaggcaggaggatcacttgagctctggagttcaaggttatagtgagctgtgatcgtgccactgctgcactccagcctagggaacacagtgagaccttgtctctaaaaaaataaaaattaggtggtcacaaaagtatagagggaggccaggcacagtggcgcacacacttgtaatcccagcaacctgggaagctgaggcaggaggatcgcttaagctcaagagttcgaggctaggcacaatggctcatgcctgtaatcccagcactttgggaggccgaggtgggtggatcatttgaggtcaggagttcaagaccagcctggccaacatggtgaaaccccacctccactaaaaacacaaaaattagctgggcatggtggtgggtacctgtaatcccagctactcaggaggctgaggcaagagaatcacttgaacccagaggacggtattgcaccactgcactccagcctagacgacagagtgaggctccatctcaaaaaaaaaaaaaaaaaaaaaaaaaaaagagtttgagaccagcctgggcaacatttcgaaagctcatctctatgaaagaatacaaaaattaaccgggcgtggtgatgcacgtctgtggtcccagctactcaggaggatgaggtgggaggatcacttgagactgggaggttgaggctgcagtgagcagagattgcaccactgcactccagcctgggtgacagagggacaccctgtctcaaaaaaaaaaaaaaaatagaaaggggaaaatcaaggtgcgagaaagtgtgtatagaatggggaaaagcaaatgaacacagcatctgttttattttttaatttttttaatcttttatttttattttattttatttatttatttatttttgagacagagtctcaccctgtcacccaggctggagtgcaatggcgtgatctcagctcactgcaacctctgtctcccaggttcaagcgattctcctgcctcagcctcccaagtagctgggactacaggcgtgtgccaccatatccggctaatttttgtatttttagtagagacggggtttcaccgtgttggccaggatggtctcgatctcctgaccttgtgatctgcccacctcagccacccaaagtgctgggattacaggcgtgagccactgcacccagcaaattttttatttctatttatttatttttttgagacagagtctcactctgtcgcccaggctggagtgcaatggcacaatcttgcctcactgcaacctccacctcctgggttcaagtgattttcctgcctcagcctcaagagtagctgggattacaggcacccgccaccagacccagctaattttttttgtatttttagtagagatggggtttcaccatgttggtcaggctggtcacaaactcctgacctcaggtgatccacccacctcagcctcccaaagtgctgggattacaggtgtgagccaccgcgcccagccaacagcatctcttttaaatgcattgactattcaagaatttgcagaaactgctaaaaggatttgctttcaggaaggaaagctgtggctttacagttcggtgccgggaccctgaaatctgtcatcttgaccttggatctcacttagcagctgaaagatcttgggcaaatcattcaactctcctgtctcagtttgccgggctgtgcagtggggatcactgtagcttctgccttggagatcacggaggggtgagcagagttcatgtgtatggagtgctttggttggtgcccggcaaatcacaaccccatggtattttaagttatgacgactttttgcagataaatattataaagaacggaaaagaaagaaagatttcttctaggctgagtgcggtagctcacacctgtaatcccaccacgttgggaggtcaagacaggtggatagttcaagtccaggagttcgagaccagcctgggtaacatgacaaaaccccgtctctacccccaaatatacaaaaattagccgggcgtggtgacgcaggcccgtagtcccacctattctggaggctgtagtgagaagatcgcctgagcctaggaggtggatgttgcagtgagctgagatcgtgccactgcactccagcgtgggagacagagtgagaccccatctccgaaaaataaaataaaagagaaaagaaaagagatcgcttccagtgcataccccgggcacagattcacaagctgggagcttttcccctgaggacccagggaccactggacaaagggaggcctgagaggcccctgagggacccagcagctggtgaccgggctgcggtgtggaagctctggcagccctccaggtaatcagcgccccagggtttggacaagaggcccaggccagttgggcaacttgagcacaggccaggctcagcctagtcactgcccacccactctagggctagaggtgccagacagggggatgttggagggaggaggctccaggactcaggagaccccagaatcctagacccttcagggaatgtggggtgggtctaagccaagagggcatggtttgagggtttggatgatgttgcctggaacgcctcacaccctgccctcccgcttcttagagaggaaaatataccagctggtctcagccggctttcctccccctaagccaaacctcctacccagattctgatttcatcattggaaaaaaaaaaaaaaaaaaaaaaaaaaaaggcctggggctccaggaagggggtgagagagaccaggaagaggctggatcccacagagcagagaggccctttctggcctcagtttgccacctaggaaatggctttaggtcttgtcttgtattgtcttgtcttttttctcttttcttttcttttcttgaaacagttttgctctctcgcccagccaggagttcagtggcgcaatcatagctcactgcagcctcaaactcctgggttcaggctatcctcctgcttcagcctcctgagtagctaggactataggcacacgcaaacatgcctggctaatttcttaaatttttttgtaggggccgggagcggtggctcacgcctgtaatcccagcactttgggagtccaaggcgggcggatcacgaggccaggagatcgagaccatcctggctaacacggtgaaaccccgtctctactaaaaatacaaaaaattagccaggcgtggtggcgggcgtctgaagtcccagctactcgggaagctgaggcaggagaatggcgtgaacccaggaggaggagcttgcagtgagctgagatcgcgccactgcactccagcctgggcgacagagcgagactccctctcaaataaataaataaataaataaataaataaataaataaataaaaacagtaggacagaggaagcaatcagatatgcattagtcttaaatgagcagagggatgactttctacctgtgaagacgagctatcagtttatgtgaccagggtgaaattcaacagaactgttttagggtaaaaatcttgaggctcacaaggaatttccttgtgggcaaattgtgagggagatatgtagcttttttttttttttaatctttgtagctatcttatttagggataaaatgggaggcagatttgtctgacatagttcccagcttaacttttcccttggcttagcgattttggggacagacccaagatttattttcctttcacataagaaaaaaaagcaggccaggcacagtgcctcatccctgtaatcccagcactttgggaggccaaggcaggtggatcacctgaggtcaggagttcaagaccagcctggccaatatggtgaaaccccatctctactaaaaatacaaaaattactcaggctgtggtggtgcatgcctataatcccagctatttgggagactgaggcaggagaattgcttgaacacaggaggcagagattgcagtgagtcaagatcatgccactgcactccagcactccagcctaagtgacagagcaagatcctgttaaaaaaaaaaaaaaaaaaaaagattcctggactgctagaatctgcatttaataaataccccaggaggttgtgggaggcttaaaattacatgggtttattctctgaaaagtccagagattccagcctggacaacatagcaaaaccctgtctctacaaaaatgcgaaacttagccaggcatggtggctcatgcttgtagtcccacctaattgggagtctgaagcaggaggatcatttgagcccaggaggcagaggctgcagtgagccaagatcacatcatggcactccagcctgggtgacagagcaataccctctcttaaaaaaaaaaaaaaaaatccagagagtgaagttcgaaatggtttcactgggctgaaaccaaagcgttagcagggccacgctctgttaggaggctctagaggagaatctacatccttgccttctccagcttctcgaggtcatctgtgttcctcggctcatggccttttcctccatcttcaaaaccagcagcatagaatcttcaaatctctctgcttccatcatcccactgccttcattctcttctatgtcaaatatccttctgcccctctcttataagggcactcgggattaatttacggcccacccagttaggccaggatcatctctccatctcaagatcttttattgactcacatctgccaagtctctgttgtcatttaaagtaatattcacaggttctagggaccaggatatctttgaggtttattaggcagccaaccacaggagccatgcatggatacagggtatgtaaattcatgggactggttggagattcactaggaagtgagtatagtagggccaaagaaaacaatgggttcaatatgaaaggctgaaaagacaagaaaacctagctacttgggaggctgaggcaggaggattgcttgaacccaggagatcaaggctgcaatgagctatgattgggccactgcactctagcctgggcagtgtagtgagaccccatgtctacaaaaacattaaaaaaatagataggtgtggtggcatgcaactataatcctacctactcaggaggcaggggcaggaggatcacctgagcccaggagatcgaggctgcagtgaggtacgattgtgccactgaacttcagtcttaacacacacacacaccagagtgcattgtaaaagtaattattattttgtgaaatttttgcttaatttatatacatatttgcacacatactgcattccaggtaaaatatacatctagctagggtgtggtagcttgcacccaagtccctgctagtgagaggctgaggtgggaagactccttgagcctaggagttcagaccagcctgggcaacacagcaagtccccatctctaaattaaattccttgagctcagaaattggaggctgcagtgatctcaccactgcattccagcctgggcaacagagcgagaccccatctctaaaaataaaataaatatgctaggcacggtggttcacacctgtaatcccagcactttgggaggccaaagctggcagatcacttgaggtcaagagttcgagaccagcctggccaacatggtgaaaccccatttctactatgaatacaaaaattagccgagtgtggtggcagtcccctgaaatcccagctactcgggaggctgaagcaggagaatcacttgaacccgcgaggcggaggttgcagtgagctgagatcacaccactgtactctagtctgggcgacagaacgagactctgtctcaaataaataaataaataaatagataaaataaataatcataaaataaatacatgaaatgtatacatcctgttgtggatcaggtgtctctagttcaaaattacttgagaaacactggtgtgccaagccttctgtggtccatgagtctcaccacgtcactcctttcctcacacatttttttttttttttgagagggagtcttgctctgtcgcccaggctggagtacaggggcgcgatctcggctcactgcaagctccgcctgccaagttcaagcgattctcctgcctcagcctcctgaatagctgggattacaggcgcccgccaccatgcccggctaattttatttttgtacttttagtagagatgggttttcaccgtgttagtcaggatggtctcgatctcccaacctcgtgatccacccgcctcggcctcccaaagtgctgggattacaggcgtgagccaccgcgcccggcctcctcgcacatttttctcttcatttctccagaatcttcacatttccactcaggaatctgctgagtccaccagtctgggtcacgtgtctccccaggcttcccccaggcccctggactcctaatcccagccctggccaccctgagtggtcaaagtctggggaccacggtttgccacctccattggactgagggtgggggttggctgtctccacctccactgtgtcccaagcacggccctgcctggggccaggcacacagaagggtcttcaggaatgtgggttgatgctttgctttcagaaataggaaggaggaccgggagcactggctcacctctgtaatcccagctactccagaggctgaggctgaaggatcatttgaacccaggaagtgggttcaagtgactccatctcaaaaaaaaaaaaaaaaaaaggctgggctcagtggctcatgccttaatcccagcactttgggaggcggaggtgggtggatcacctaaggtcaggagtttgagactagcctggccaagacggcgaaacctcatctctactaaaaatacaaaaaattagccggatgtggtggtgggcgcctgtaatcccagatactcaggaggctgaggcaggagaatcacttgaacccgggaggtggaggatgcagtgagccaagatcacaccattgcacgccagcctgggtgacaagagcgaaatgtcgtctcaaaaataaataaataaaataaaataaaaattaaaaaaattaaaaagtaaattaaattaaaaataaaaaagagaaagaaacaggaaggaaaggaggagatgtcaggagcgttgcacattccagcctggggaactggagaacagccctgcccttctcttcctacctccctgattgtttatttaagagctggcctgtctgggcggctcagccctgtctcccccagctgcagggtggcaggccccagtggctcctggtgcaattgtaactcagggccgggcgtggtggctcacacctgtaatcccagcactttgggaggccgaggtgggcagatcacatgagaccaggagttccagaccagcctgggcaacgtggtgaaacgccttctctactaaaaatacaaaaaattagccgagcgtggtggcaggagcctgtagtcccagctactcgggaggctgaggcaggagaatggcgtgaacctgggaggaggagcttgcagtgaggcgagatggctccactgcactccagcctgggcgacagagcgagattccgtctcaaaaaaaaaaaggtaactcaggtttctgagccttgaagcccaaagctggggtggcaggcactgccctccccacctcccccaaaatccagccaaggtggggacttgtttccctaccacagcaaggtcccagcctgggaacctacaggtatttcagggctcaggtgacctggatggaaagacattcaatacttcctaggaggcaggataagacaatggttgagggggaaatggaggcagagagatgggcctccccagcttcttctttttttttttttttttttttgagacagagtctcgctgtgtcacccaggctggagtactgtggcacaatctcggctcactgcaacctccacctcccgggttcaagtgattctcctgcctcagcctcccgagtagcagggattacaggcccacgccagcatgcctggctaatttttatatttttagtggagacggggtttcaccactttggtcagactggtctcaaactcctgacctcaagtgatcctcccacctcggcctcccaaagtagtgagattacaggtacaggtgtaagccaccacgcctgacacccccctacttcttagatgatcttgggtaacggattccatctctgaacctcgggtcatctctgaaataggatgaaagtaatacctaccccagatgtgccagcagcagtaaagaaaaccttagcataggtctgggcaatgccatgagatcagtatattaggggctggggggcctatgactgtgattgttactttttgctttagagagccctagtcagatgtgagtcaggccatacaatgcagcctctgaagggacatagccctatgggcgtggagggggaggttgtgaaatagccttgccctgggggtctgagggaacagggtcctaccctggcgggtctaaggcctgccctgggggtctgaaggatcagatatctcaaaaggccaatctacaacagcggtgttattggggcagtagcctatcttctaacctccaggataatggctgataatcttttatgtctgcgccttagcagtactcagggtcctctcctccccgcagcctgatgacctcccattaactttacaaaagcggttgagttttgggcaaagcctattatttaaactgtaccctaaatgtcttccaaagtttggcccaatagcccaggaataatgaagggaaaggcaagatgaagtatgggttagcttagcttactgttataatttttcttactgatataatttttgcaaaagtgggccaggcacggtggctcacacctgcaatcccaacacttgggaggtcgaggcaggtggatcgcctgagatcaggagttcgagaccagcctgggcaacatggtaaaaccctgtctgtactaaaaatacaaaaattagctgggtgtggtggtgcatgcctgtaatcccagctactctcaaggctgaggcaggagaatcgcttgaacccaggaggcggaggttacagtgagccgagatcgtgccactgcactccagcctaggtgacaagagtgaaattctgtctcggaaaaaaaaaaaaaagatttttgcaaaggcagtttcaggtttgaggggacacaggcccagccctttggggtctgaggggacataggcctgcccttgggggtctgaggggacgtaggcctgcccttggggggaagcgctgagaggacatggccctataaagccaattctagggccaggcgtggtggtttatgcctataatctcagcactttgggaggcccagacaggtggatcacttgaggtcaggagttcgagaccagcctggccaaatggtgaaaccctgtccctactaaaaatacaaaaattagctgggcgtggcggggggcacctgtaatcccggctactcgggaggctgaggcaggagaatctctggaacccgggaggcagaggttgcagtgagccgagattgtgccactgcactccagtctgggcaacagagtaagactccctctcaaaaaaaaaaaaaaaaaaagccaattctgagagtatacaatcacacagcacattcctagtgattatgtgggtgtcacccctgagggcagttggcctgaaggaccaggacattttgagtctgggaggcactgctaccagctcagacgcctgggcctagacatcccttgaataaactagctaatgaaaggtcccacctccacttctcctttctgagagaagtgtgaggcctggggcctggatttgagaggtgttagaatttgcactttagcccagagtgaggagcagtgtaggtgctgattaacaggaactggacaaagtcctcccagagctgaagagccctggcattttgggggtgggaggggcagggcaaaggggctccagtgagaagcacacctgaggctccagtgaggcccatgaaaccgaggaggctaatcccatcctgacacagacaaggcaaccatgtctcaaagtcccacagccaatgaatgaaacagccaggagagaggccaggacctgggaactttatgcttccaaccaccaaagccccgtggtggggggcctcatatggcctgagaaaatcagcaacacacattccacacaactgctttcttccaagggccaatttattattattattattattattattattattattattattattattttgagatggagtctcactctgtcacccaggccggagtgcagtggcgcaatctcggctcactgcaacctttgcctcccaggttcaagcaattcttgtgtcttggcctcccgagtaactgggatttacaggcatccaccaaccatgcctggctaattttgtatatatatattttaatatggaacgcttcacacctgggattacaggtgtgagccactgcccccggcccgaatgccaattaaaaaacaaaaaactttactattattatttttatttaagggacaaggtctcactctgtcacccagactggagtgtggtggtgagatcatagctcactgcagcctctaactcctgagctcaagtcatcctcccatctcagcctcccgagtacctgggactacaggtgtgcaccaccaatacacacatacagatagatagatagatagatagatagatagatagatagatagatagatgatagatagatagattagtttgtttgtgatggagtcttgctctgttgcccaggctggagtgcagtggtgccatcttggctcactgcaacctctacctcccaagttcaagcgattctcctgcctcagactctcgagtagctgggactatgggcacatgccaccacacccggctaatttttgtatctttagtagagacagggtttcaccagaaaaaaaaaaaacttatttgctttatcttttcgctttcccctggtcctgccagcctgattccttttcccgaattaggactccacaactaatgtttatcgaacatttactatagcccagaggtacagcttctcagcaaaccaatgggtcctattaatatcctcattttatagctgagtaaacagaggtacagacaggtgatgtgacttggccaaggtctcacagcttaattgagagagtcacatttttttctttctcttttttatgattattttaaaatttttaatttttttttagggacaagatctcgttctgtcacccaggctgggatgcagtggcatgatcatagctcactgcaaccttgaactcctgggctcaagcaattcttccgcctcggcctcctgagtatagctgtaatctcagcactttgggaggctatgcagggtggattgcttgagcccaggagtttgagaacagcctgggcaacatgacgaaaccccatctctacaaaaaatatagtagctgtgtaccagctactcgggaagctgagcctgggaagtcaatgctgcagtgagctgtgattgcaacactatacttcagcctaggtgttggagtgagaccctgtctcaaaacacacacacacacacacacacacacacacacacacacacacacacacacagcctgacagaggcatgcactgttgaaggtgataacgtggaagaggacaaaagtgacaggccaggtgctgggcctcatggcagcgttcaaactcctggagccagctatgcctgaagccagcccatcgattcctgatgtcgctgaagagttacaatcaggttttcagccacttgaaacagaaagagaccaaacgtacccagggaagggacaagtggattcagcccactgatacggcaatgggaagtagggttcatggaagggggaaaggcgggaccgtgtaaaagtgagtaggaacacgacccattccaggggacagacagcagatcatcggggtggctgccatgcaaaatttataaggggtcatggtgaggtcatggtgccacctttcagttgcaagagaaagggagaagccgtgactattgtgaaagcaaagtagaatctcaggaccccgaattcactaggtcaaagggaaaattaagctggggaactgaggcaccagtactgtcttccttttgttcccagattgctgtaattttccaaccccgtatcatagcttaatttactcttttttttttttttttttctgagacagcgtctcgctctgttgcccaggctagagtgcagtggtgaatcttggctcactacaacctccgcctcccgggttcaagcaattctcctgcctcagcctcccgagtagctgggactacaggcacccgccaccacgcctggctaattttttgtatttttagtagagacggggtttcactgtgttagacaggatggtctcgatctcctgacctggtgatccacccacctcagcctcccgaagtgctgggattacaggtgtgagccaccacgcctggccattttttaaatttcattttatttattttttttgagatggagtctcactctgttgcccaggctggagtatagtggtaagagctcagctcactgcagtctccacctcccgggttcatgcgattcttgagctcagcctcctgagtagctgggattacaggtgcctgccaccacacctggctaatttttatatttttagtagagacagggtttcaccattttggccaggctggtcttgaactcctgacctcaggtgatccacctgcctctgcctcccaaagtgctgggattacaggtgtgagccaccgcacccggccaacaccggatcgtatcttgaagggagaagggcttcatgcaggatcagtggggaacatcaaagggtctaagcagcagagtgacacaatcaagtttgtgtttagaagcttctgcactctcacacatttgctggtgggtgtggaagttggtacggcctccctggaaagccattaggcaaaaggccttaattttagatcctcccacaccctttgacacagcagttcttctctgagggatttattccacggctattgtcttgcatgcgaaaaatcaccacagccctgcttgcagtagcaaaagactagaagcaaactaagcacataccaggaaggaaccagcaaaatatgttgtggccattcatgctatggaacactagacagctgtagaaaagaatgagccacgtttacaggcattgcactggcgtgctggtaaatacttaaccaggccgggcatggtgtacttccagcattttggggggcctaggtgggagaagggcttgagcccaggagtttgagaccagcctgggcaacatagcaagaaccctgtctctacaaaaaaatacaaaaatttgtctgggtgtggtggcttatgcctgtaatcccaacactttgggaggccaaggtgggcagatcacttgaggccaggagttcaagaccagcctggccaatgtggcaaaacgctgtctctactaaaaatacaaaacttagccaggtgtggtggtacgtgcctgtattccgagctgtttgggaggctgcagcatgaaaatcacttgaacctaagaggtgaaggttgcaatgagctgagatcacaccattgcatccaacctgggcgacagagctggactctgtctcaaagaaaatacaaaaattagctgggtgtggtggcacgtgcctatagtcccagctactcaggaggctgaagagggaggatcgcttgagcccaggaggtcgaggctgcagtaaactctgattgcaccactgcactccagcctgagtaacagagcaaaatcatccatatatatatatgtatgtatgtgtgtgtatatatatatacacacacacatatgtgtgtatgtgtatgtatatacacatatgtatatatgtgtgtatatatatatatacacatatgtgtgtgtgtgtatatatatatatacacatatgtgtgtgtgtgtatatatacataattttttttttttgagacggagtctcgctctgtcgcccaggctggagtgcagtggcatgatctcagctcactgcaagctctgcctcccaggttcaccccattctcctgcctcagcctcccgagtagctgggcctacaggtgcccgccaccacgcccagctaattttttgtatttttaatagagatggggtttcaccatgttagccaggatggtctcgatctcccgacctcatgatctgcctgcctcagcctcccaaagtgctgggattacaggcgtgagccactgcgcccagccaatatatatatatatatattttttttttttttaatttaaccaccagctctctagggaagaaacagccctaatttataccatttgccaatttctacagtgtaaatattcccactgtggttgatttctagttactgataggatgtcattggatgtggaattcagaagagacaagcaaccacccactatcactcaggatttccaccaggcagagataagtagcctggagagcatagataatagtaaaaatgtagcaattaggatgcaatgcatttgaactatttattatatttgtttttaacataatttatttatctgtaactttgtatcatttaattgttaataatacctatgtttaacaactggtttgtgaaattcccaaaagtgtagcaatctgctcttgagaactgggcacagcacacattgagacacaaatggatcttcaagaagagaaagcaaaagccaacttttggaaaatggcctggaaggttctacactgctcactcccttaattttaattttatttatttatttatttatttatttatttatttatttatttattttttgagacagggtctcactctgtcacccaggctggagtgcagtggcgcaatcgcagctcactgcagccccctgggctcaagcgatcctcccatctcagccatctgaactacaggcacgcaccaccgcacccagctaattttaaattttttttttttttttggagatggaatctcactatgttgcccaggctggtctcaaactcctaggctcaagtgatcctcccacctcggcctcgcaaagtgctgagattacagatgtgagccactcgcccagccgtcattgtatttctgtacagcactgtctttctcccccactagaatgtcacctccacaagggtaagaacttgatctattttggattgttttttgtttttgtttttgtttttgccatatgcccagtgcctagaaaagcacctggcatataataggtacttagtaaacctgtgttgaataaataaatttactatttatttatttatttattttgagacggagtctcgctctgtcgcccatgctggagtgcagtggtgcaatcttgggccactacaacctccgtctcccgggttcaagtgattctcctgcctcagcctcccgagtagctggaactacaggtgtgtgccaccacacctggctaattttttgtatttttagtagagacgaggtttcaccatgttaaccaggatgttctcaatctcctgaccttgtgatccacccatctcagcctcctgaagggctgggattacaggcttgagccaccgcgcccggccaatttacgcttaaggaaaaaaaaaaggtgcaccagcctggacaatatagtgagatcctgtctgtacaaaaatttttaataaattatccaggtgtcatgggcttcagcctcaagcgcatggccgctcccattgaccatgtgggccagaccatagagcacatgggctctggcgtggagcacattggccctgccatcgaacacgtgggcctgaacatggagcacatggtgcttgcaggcatggaggctggcttggagcacatgggccccatgatggatcacatggtcactggcctagagcacatgggtgccaagagcctcacgtgcatgggcctggccatgtgtggcagtggcggtgccacctttgaccatgccatcggtatggagtgtggcaactttggaagctttgcaggttcccttggtggagcaggagaccatgctcctgggcatggccaggaaggcatgccaaatatttgtaagaaatctcccattcaattttacatggaagatgctaaaggacaaattcaacgagtatggccacatgctgtacactgacatcgaaatggagaacgggaagtccaaggggtgcagtgtggttaagtttacgtccccagaggtggctgagagagtctgccggataatgaacaacatgcagctgaatggccaagactgatgttcaaataaatagaaatgcttaagcagttgccttttttaaacatcaataccagacctctgaatttgtattttttcttgttaactttttttttttttttttgagacagggtttcgctcttgtctcccaggctggagtgcagtggcgcgatctcggctcaccacaacctctgcctcccggcttcaagagatactcctgcctcagcctcctgagtagctgggattacaggtatgtaataccatgccggctaattttgtatttttagtagagacagggtttctccatgttggtcaggctggtctcgaactcctgacctcaggtgatccgcccacccttggcctcccaaaatgctgggattacaggcatgagccactgtgcccggccctcttgttaacctttttatttttcttttccttttttttttttttgagacacagtctcactctgtcgcccaggctggagtatagtggtgcaatctcagctcaccgcaacctctgcctcctgggttcaagcgattctcgtgcctcagcctcccaagtagctgcgaccacaggcatgtgccaccacgcctggctaagttttgtatttttagtagagatggggtttcaccatgttggccaggctggtctcgaactcctgacctcaagtgatccacccgccttggcctcccaagtgctgggattacaggcatgagccaccacactggctttttttttttttttttttttgagacagagtctcgctctgtcgcccaggctcagtgcagtggcgcgatctcggctcactgcaagctccgcctcccgggttcacgcccttctcctgcctcagccttccgagtagctgggactacaggcacgcgccaccgcgcccggctaatttatttatttatttttatttttgtatttttagtagagacaggggtttcaccatgttagccaggatggtctcgatctcctgaccttgtgatccgcctgcctcagcctcccaaagtgctgggattacaggcatgagccacagcgcctggcagctttttttttttttttttaatttagcattttaattttttttttttttttttttgagacagagtctcgctctgttgccaggctggagtgcagtggtgcaatctcggctcactgcaacctccaactccctggtttaagcgatcttcctgcctcagcctcctgagtagctgggattacagacacgtgccaccacatccagctaatttttttttctttttttttgtatttttagcggagacggggtttcaccatgttggccaggatggtttcgaactcttgacttcgtgatccacctgcctcagcctcccaaagtgctgggattacaggtgtgagctaccgcgcctggccaatcattttattatttatttatttatttatttacttttgagagagtctcgctctgttgcctacgctgtagtgcagtggcacagtctcaactcactgcaaactctctctctcaggttcaagcaattctcctgactcagcctcccaaatagctatactacaggcactcaccaccacacggggctaattttttttgtatttttagtttcaccatgttggtcaggctggtctcacctgacctcaggtgatccacacaccttggcctctcaaagtgctaggattataggcatgaaccaccacgccagaccacttgttaaccattttaatttgttggctggatgtataaagatgttaaaaaagcttgaacccagggaggcagaggtttcagtgagccagagatcgtgccattgagctctagctgggcgacaagagcaaaactctatctcaaaaagaaaaaaaaaaaagaaaaagatggtaaaaaaaaaaaaaaaaaaaaccagttgctttttgggctaatttaattacttttttaaatgactggtgttccatttgactgtttgccttgagattgcactgtgcgcaattttttttgtagttatggtgtcttcttgacattgaatatgattttgataataaatactggttcttgaaaaaaaaattagccaggtgtgctggtgcacgcctatagtcctagctacttaggaggctgaggtgggaggatggcttgagcccaggagttggaggatgcaggtgagccctaattgtgccactacactgcagcctgggtgacagacagagagacagagagaccctgtctcaaaaataaataaatgaggccaggcaaggtggctcaggcctgtaatcccagcactttaggaggccgaggtgggcaaatcacgagatcaagaaatcgagaccattctggccaacatgatgaaaccctgtctccactaaaaatacaaaaattagctggatgtggtagtgcgcgcctgtagtcccagctactcgggaggctgaggcaggagaattgcttgaacccgggaggcggaggttgcagtgagctgagatcgcaccactgcactccagcatgggtgacagagcaagattcagtctcaaacaaaaacaaaaacagaaaacaaaattagctgggcctggtggcacatgcctgtagtcccagctacttgggaggctgaggcaggagaatcgcttgaacctgggaggtggaggttgcagtgagctgagatcgtgccgttgcactccagcctgactgacaagagcaaaactttatctcaaataaataaataaattaaataaatgaaagttgcagacacatgtgaatgacctgggcagcatttctccacctgcgcttgcatttgctagacagtctgtgactctctgtgggagaaaacacaagaaaccggcccctctgctggttccccacctggcctggctctcctgttctccaccctgcacactcatgcctcggaacctgcttctcctctgagcctccctcacagtggcccggcccacgtggcctttaatctgcccacatcagagcctccacctccggcctatggcccatcagaggcagctggagccgggcatcctccccacgtgggcctttgaggatgggatgaaggaagctgagcggaggtcgcagtgcctcccaggaggggcctggaggggagggaacaggggagaggagaaggtttttccactgtgtcccctcctgtgactgtagaaatgagccatgtgacttcaattacctattaacattttttgaagtgttctataaaaagtgccagcctcgggctaccgtggggagcagggaaggaggagggtgagtccaggcgtgaggaggccggagcggtgacccgggagtggggacggccggggctgccaggcagtcacagcctgtcccagaaggccccgtggtggaatgctgtgcagaaagtccttagaaggctctggcgggggcggcctgtccctcagcaccctcctctctaagccaacttcagggtttcccggaaaggcatctcctccaccacctctgcccctacccaaaatgatccccaaatgtctggtggataaaaactctcgatctttccttcgcactaggtctgtaagggtgggagctgactcacatctggccctccacctccacccttctcctctctcctccccgcctccttctctctcacctctgtcctctcccttcctctccctcctctccctctttccctcctatccctcctcctccctccaacccctcctcctcccactgcctctcccaccctccctcctttcagcgagacacaacctcctccagggcccccaaaacaccaaccctctctctgctccacacctttgcccctgctgttccctggtagatttcatttgaatttctctgatgattcatgacattgagcatcttttcgtgtgcattatgggccatttgtatgtcttctttgcagaaatgtctattcaagtcctttgctcatttttgaatcggggtgcctggaactctctgccctcatccccgcccccgccacctcttcaccaaaccctgttttctcctggagatcttggatccttccttcatctaacaaatatttgccggacgtcaaccctgtgtcgggcaccctgccagggattggggaacacagggttaggagaggctacattgtagtggagaaggcaggaaataaaggagtcaacagagactgcaaacaagggaatgttttcttttcttttttttttttttctacagtgttcatgggcttgatttaaaagcttgcttatttatttatttatttatttattcattcattcatttatttatttttgagacagggtctcattctgtcacccaggctggagtgcagggcgtgatctccactcactgcaacctctgcctcctgggttcaagtgattcttttgcctcagcctcctgagtagctgggattacaggcgcccgccaccacgcctggctaatttttatattttttggtagagacagggtttccctgtgttggcgaggctggtctcgaactcctggcctcaagtgatcctcctgcctcagccacccaaagtctgggattacagacatgagacacagtgcccagccaaaagcttatctttcttatttatttatttatttatttttgaaacagagtctcactctgtcgcccaagctagagtgcagtggcacaatctcagctcactgcaacctccacctcccagtttcaagtgattctcctgcctcagtcccctgagtagttgggattgcaggtgtgcaccaccacacccggctagttttttctgtttttagtagagacaggatttcaccatgttggccaggctggtctcgaactcctgacctcaggtgatctgcccacctcggcctcccaaactgctaggattacaggcttaagccaccgtacctggcctatttgtttttggagatgaggtctcgctattttcctcaggctggactcaaattcctgggctcaagtgatcctcccacctcagcctcccaaaatcctagtgtttacaggtgtgagccccagcacttgacataagagaactattttaaaatttatttttagagacagagtctcaccccatcacccaggctggagtgcagcagtgtgatcatagctcactgcagccttgaactcctgggctcaaacaatcctctcaactcagcctcctgagtagctgggactacaggcgtgcaccaccatgcccagctaatttttttgatttttttgtagagatgaggtctcactatgttgcccagactggtcttaaactcctgggctcaagggatcctcctgcttcagcctcccacagtgctgagattacaggcatgagccactgcacctggccaagacaattttttgaaagagctcagtgctgcaagaagaattcgtctgcaatctgagtgaggataaggaacctgcctgatgagggactgagaagagagaagctggcaaaagaaatagcaagtgcaatgaaccagacgtgagaatgaacttgaagtggtcaggaatcagatggagaccaggggccatggctcacacctgtaatcccagcactttgggaggccaaggcgggtggatcatctgaggtcgggagttcaagaccagcctggccaacatagtggaaccccgtctctactaaaaatacaaaaattagctgggcatgttggcgggcgcctgtaatcccaactacttgggaggctgaggcaaaagaattgcttgaacccaggaggtggaggttgtagtgagccgagatcacgccactgcactccagcctgggcgacagagcgagattctgtctcaaaataaataaataaacaaaaatgaaaagaattagaaggaacagggtggctggattcaagggattgtggggaagtgtcatcagatgtggctgaagaggtaggttgagatgggcatcatagactctgtgaagaacttaagaacctcctcttccaggaagcccttcttgactgcatcaactaggttttcccatcccagccctgttcccactaggttgttgctcttggggcactggcctatctgctccgctggcctgtgagccctctgacggccaggccagtcaccactatgtcctcagcatcacctagcacaggcctgagcacacaggaggtggtcggtaaatgcccaggtcattctggcactgccagcaagccccaagaagcatcccttgctctgcctccccgccgcgcacctctgttcctgggcgtagcaccagggattcctgagttccccgtttggccattcacactggtttcagcctagcctctttcatcccatcctcaaaggcccatgtggggaggaggccgggatccagccgcctctgatgggctgcaggccggaggtgaaggctctgaagtgggcagatcaaacgccatgtgggttgggccgccgttggggaggctgagaggagacgcaggttcccaggcatgagtgtgcagggtggagaacaggagagccaggccagatggggaccagcaaaggggcccatatgttcacccgtctttataataacacagcttccaattgttgattcattacggccaggtacagggttaattttttttttttttttttttttgagacagggtctcactctgtcacccagactggagtgctgtggtgacatcatggctcactacaggcgtgtgctaccatgcctggtttattatttttaaaaatgttttgtaggctgggtatggtggctcaagcctgtaatcccagcactttgggacgctgaggcggacggatcacctgaggtcaggagttcaagaccagcatggccaacatggtgaaactccatctctactaaaaatacaataattagccgggtgtggtggcaggcacctggagtctcagctactagggaggttgaggcagaagaatcgctttaacccaggaggcggaggctgcagtgagccaagatcacgccactgcactccagcctgggtgacatcacgagactctgtctcaaaatagaaaaaaatgttttgtagaaacaggatctcactatgtcacccaggctggagtggaggcaccgttgtagctcaatccagcctcgaactgctgagctcaagtgatcctcccacctcagcctcccaaagtgctgagattatgggtatgagccaccatgcccagctaaaagtcaattcttttgatagaaaggtcagaagagcagagaagatcaaacagctggttcatgtgctgatgggaatgatctggatttctagattccagaagagaagcaagagaggaaagtggctggattgttgtcgttgagtaagcaagaggggaaccatccctaggctcaagagaagaggtcttgagaaagagtatatggcagccaggcgcggtggctcacacctgtaatccaagtactttgggaggccgaggcgggcggatcacgaggtcaggagatcgagaccatcctggctaacatggtgaagccctgtctctacaaaaaaaaaaattacaaaatattagccaggtgtggtggcaggcacctgtaatctcagcaactcaggaggctgaggcaggagaattgcttgaacctggaaggtggaggttgcagtgagccgagatcacgccattgcactccagcctgggctacaagagtgagattccgtctcaaaaaaaaaaaaaaagaaagaaagaaagagtataaggcactctgagaggctgaggcgggcggatcacttgaggccaggagttcgagactagcctggccatcatggcgaaaccccatctctactaaaaatataaaaattagctgcttgtggtggtgcgtgcctatagtcccagctactctgaggcacgagaatcacttgaatccaggagacagaggttgctgtgagtagagatcacaccactccactccagcctgggtgacagaaaaaaaaaaaagaaagaaagagtgtataaggctggacacagtggcttatgcctctaatcccagcactttgggaggcggaggctttcaaatcacttgaggccaggggtttgcgaccagcctggccaacatagtgagacctcacgtccactaaaaaaaaaaaatacaaaaaattagctggacatggtggcacacacctgtaatcccagctacttgggagactgaggcatgagaatcgcttgaaacagggaggcagaggttgcagtgagttgagatcacactattgtactccagcctgggtgacagactaagactctttctcaaaaaaaagaaagaatatagttcagccgggcacagtggctgatgcctgtaattccagcactttgagaggctgaggcgggaggatgccttgagcccaggggtttgagaccaacctgggaaacagcaaatccccgtgatatgatttgggtgtgtgtcctaacccaaatctcatgtagaattgcaatactcagccaggtgcggtggctcacgcttgtaatcccagcactttgggaggccgaggcgggtggatcgcaaggtcaggagttcaagacaagcctggccaagatggtgaaaccccgtctctactaaaaatatataaattagctgggtgtggtggcacgtgcttgtaatcccagctactcaggaggctgaggcagagaattgcttgaacccgggaggcagaggaaacgcacaaagcaaggcagcaaaagcagagatctattttaaaggaaagcacacttcacagggtgggagtggactcaagctagcagctgaaaagtgtccgttacagaatttttggggatttgaataccctctggaagtttcccattggcctgtgaccagtctgattggttgtaggagaggaccaattcgaatgaagagtaggcctgtaaccagtctgattggttgtgggagaggaccaattagaatgatgcataggcccgcagccagtctgattggttgcaggagggggccaatcagaatgaagagtaggctcaggaccagtctgattggttacaggaggggaccactcagaggtactttcatttttcaacagccatgcagaaaaaggagggtttgaaaggggagtagcctctgatatccagtcatcatgaattggccttaggctctctggctccagaccctattctcctgcctcagttagagtgatgcaaggagggccttgagctgaggaatgtggacagcttcctgaagctggacagggcaagagagcctccaggagaagccctagagtctccagaagggatgcagcccagccaacaccttgatattagccctgtaaaacccattttgggggcctggggcaatggtttatgcctgtaatcccagcactttgggaggccgaggcaggaagatcgcttgagcccaggagttggagaccagcctgggcaacataggaagagtctctacaaaaaattttttaaaattagccgggcatggtggcacacacctgtagtctcagctacttgggaggctgtgacaggagaactgcttgagcccaggaggctgaggctgcagtgagccatgatcaggccactgcactccagcctgcatcatagagccagaccctgtggtaaaaaaaaaaaaaaaaaaaaacctccagaacagtaaggtagtaaataaatctgtctcctatggagccactaagtgtatggtcatttgttacaggagcaataagaaaccaatacccttggctgtgcacggtagctcacccttgtaatcccagcactttgggaggccgaggcaggcggatcacctgaggtcaggagttcaagaccagcctggccaacatggagaaaccccgtctctactaaaatacaaaaaaaaatcagctgggtgtagtagtggtgggcgtctgtaatcccagctattcaggaggcgagactgaggcaggagaatcacttgaacccgggaggcagaggttgcagtgggccgtgatcacggcactgcactccaggctgggtgacagagcgagacttcgtctcaaaaaaaaaaaaaaacaaaaaaagccagtcacagtctgcatggaacagaggaagagcgggtggaagatgaggtcagacagagaacagggagctggtgagtcatggtgaagatgttgtcttttagtgagtgtggcaggagccacagaagggatttgaggaggagaatgacatcatgtcacttctgtcaaaggattctgctgccatatggggacctttctgttggggacaagggcagaagcagcgaggaggtgactgcaattttccaggtgagaaatgatcatggctagactagctctgggggttcagactttgtttttgtttttgtttttgtttttgtttttgttttgaggtggagtctcgctgtgtcttgtccaggctggagtgcaatggtgcgatcacggctcactgcagcctccatctcccagcttcaagcgattctcctgtcttagccttccgagtagctgggattacaggcgtgtgccaccacacctggctaattttgtattttttagtagagacggggtttcaccatgttggccaggctgatatcgaactcctgacctcaggtgatccgcctgcctaggcctcccaaagtactgggattacaggcgtgagccacggcgtccagcctttggggggtccgacttcgggtgcattttgaaggtcaacaggatttcccctggatgggatgtggggtgtgaaagcagagaggagtcatgagccctttctaagtttccagacagcatgcttgaacacacgatggtttctctggggctcaaggacattaggctactcctggcccttagcgtgtagctgtacacaggaagtgtcctgctgtgctgtattaattaaagtggatgttgtcagccgagttggagacatcccgggggaggaaaggccgggctgaccctggttaacttcaggcaggtgtcaggcatgcagcgaatgtcatcttccgcctctcattctccctctgggctgggcctgcctcttctttccccagctagcaaataaatcatctctcccatctccacctggaattcattctcactcatgtttaatgaggctaccacacccttctgccaggtgtgtcttcacccaggtcgctgataactacaaataggttatatttcaactcttttgagtatgctgtgaggtagagatccaatttcctgctgcgtgtgcagaacagaagacaactgtctcaaacaaaaagaaaaaccaaaacaattattttaggcctggcgcagtggctcacacctgtaatcccagcactttgggaggctgaggcaggaggccgagctggagctcagtagttcgagaccagcctgcgcaacatagggagacccctgtctctgctaaaaattttaaaaatcagcctagcgtggtggtgcacgcctgtagtcccagctactagtgagactgaggcaggagtgatggcagtggctgctgtcattacaccggctgcagcagggaggtgcggctggggctacacactccatggagccggtggaagccctgccccttctgagctgtggtgggagttccccagatgccactgcagccgcccaaaccgccactgtggattgagccttcctgtgctcttgcaggggccagaagtaggtagggtctgccctcccgggtgcagctgcagctgcccccatggctgccaacctaggcctccagctccacagagtgagcaagagccggggacaagtgggagccccaccccttccgagttggcagggcaggagctccccggatgcagctgtggccgccctctgaggctgaggacctgggcctctctgcagcctgcactctcagaggccgggaaggcccccccaatctctgcagactgctgggtgtcttctcctgctgcctggcctctcttctctcccagcgccagctctgatctgggatcggggttggggtccagtcctggggccatgaatggcagcaggaggcagacggattcctgggcagaagttggtggggggtccctagtaaggccccaccttcttgccagggagggcctgaaggctgggggccaggctgccaaccccacagacaagagtggggacttgtacctcctctgggcccacgcatggcagcccatggaccaaccagcacgtacttcctcctctctgaggtccataaaagccccaggctccaccagagcagggcagagggcagaggacagagagacaatgggattaccacctgcacagaggagctaccctctctactgagagcttcagagacctgcagagacgcctacatgacctgcctgccgagaggaaccaccctcttcagggcctcatctctgctgagagctgaacactcgatggggtgacctgcctactgagaggagctgcccactgacggtctcctctgagctgttctaagactaaataaagctcctattcatcttcttcacccttcacttgtctgtgtacctcattcttcctggacacaggacaagaacttgggcaaaggcactgcagccacagaggtttctggccagaaaagcaacaccccaaagatcccgtaacaggaggatcacttgagcccaggaggcggaggctgcagtgagctgagattgcaccactgcactccagcctgagtgacagagcaaggccccaactaaaaaacaaaaaacaaaaaaagcccagatattttataataaaaaaaaaattttatggctggccacggtggctcacgcttgtaatcccagcactttgggaggccaaagtgggcagatcacttgaggtcaggagtttgagaccagcctcaccaacacggtgaaaccccatctttactaaaaatacaaaaattagccaggcatagtggcacacgcctgtaatcccagctactggggaggctgaggcacgagaattacttgaacctgggaggcagaggttgcagtgagctgagatcgtgccactgcactccagcctaggcaacagagtgagactctgtctcaaaaaaataaaataaaataaaataaaaaataaagtgaatgggaagacacagagtctagcactctagaaatctgggttccagtctcatctgctcattgtgtgtccttgggcaaatgatcttccttatctacaaagaggagataatactcagaattgcaatgctaataccaagagccacttcacagcgtcattacaagattaaatgggattatgcctttaaagccttggaagctgctgggcctagagcaggagctccccctaacagttcagaagcttccttgaggctgggctcggtggcttacacctgtaattccagcactttcggaggcagaggtgagcagatcacttgagcccaagaggttgagaccagccggggcaacatgatgaaaccgccatttctttttttttttttttttttgagactgtgtctcgttctgttgcccaggctggagtgcagtggcgcgatcttggctcactgcaagctctgcctcctgggttcacaccattctcctgcctcagcctcccaagtagctgggactacaggcgcccgccaccacgcctggctaattttttttttttttttgtatttttagtagagacggggtttcaccttgttagccaggatggtctcgatctcctgacctcatgatctgcccacctcggcctcccagtgtactgggattacaggcgtgagccaccgcgcccggccttgaaaccaccatttctacaaaaaacacaaaaaattagccagacttggtggcatacacctgtaatcccagctacccaggagactgaggtgggagaatcacccaagcctgggaattcaaggctgaaatgagccatgatagtgccactgcagtccagcctgggcaacagagtgagaccctgtctcaaaaaacaaataaaaccgccaggcacggtggctcacacctgtaatcccagcactttgggaggccgaggtgggcggatcacgaggtcaggagatggagaccatcctggccaacatggtgaaaccccatctctactaaaaattcaaagaattagctgggcatggtggcacgtgcctgtaatcccagctactcaggaggctgagttagtagaattccttgaaccagggagtcagcggttgcagtgagccaagatggcgtcactgcactccagcctggcgacagagaaagactctgtctcaaaaaaaaaagaaaaaagaaagaaaaagaaacaccgtctctaaaaatacaaaaattggccaggcatggtggtgggcacctgtaatcccagctacttgggaggctgaggcaggagaattgcttgaacctgggaggtggaggttgcattgagccgagatcgcgccattgcactccagcctgggagacagagtgagagtctgtctcaaaaagaaacaaaaacaaaaacaagaagcttccttgtttggtggctttctcaggttcctcttcgactttctgttctctaaaccctggagcccctcaaaagcccagaactgactctggcctgtgctttagtgcagttgcaccagggttgcaaacacatggcctgagggctccatccagccaccacatttcgtttgccaccccagagtatttttaagttttttggtttgttttttttttgagatggagtctcgctcttgtcacgcaggctggagtgcagtggcacgatctcagctcactgcggcctctgcttcagcctcccaagtagctgagattacaggcgtgcaccaccatgcccggctaacttttttatttttagtagagatggggtttcaccatgctggccaggctgacctcagatgatccgcctgcctcggccccccaaagtgcttggattacaggcatgagctaccacgtctggcccccatgtcttaaaagaaaataaaagacaggtgatctccactccacaggctccaccacccgcgtggtcttaagggcaccaacttgagtggctgtcactctcagctgactgagacttactcttgcttcccatttcactgagaagaaggaagtcattggagtagggacttttgggaactccccacaccaacaccaccaccacctgccttggcgcccacgcaccccttcctcccagatgcctctcgtgtgcttggataatcccagctgcgccttccatccctctcccatctctttcctgcatcttccggtttccccttgtctgttgcatcatccccatcagcataaaactgatgatttgagctgagcgcggtggctcacacttgtaatcacagcactttgggaggctgaggcgggcggatcacttgaggtcaggagtttgagaccagcctgacgaacatggcgaaacccagtctccactaaaaatacaaaaaattagcggggtatggtggcgggcgcctgtggtcccagctagttgggaggctgaggcaggagaatcgctggagcccaggaggcaaaggttgcggtgagccgagatcgcacaactgcactccagcctgggcatctgtctcaaaacaaaacaaaacaaaacaaaacaaaaacctgctgtgatatcatccactccaccaaacaccctccaatctcattcccccctctagcgactatttctcttctccctttatagcaaaacttcctctaaggttttttttttgttttttttttttttattcaacattatcatcagacacttatatttagccatcaacagcatgggtgcaaaacaaaaatctacattaaaaccctttgttggaatgctttgcactttccacagaagagaaactgaaataacctgttatacgattagtcacaaatacagtcctggagttttttgtttttgttttttgtccatatacatgagtattgtctccaatacatcttccactgggtatggtggctcatgcctgcaatcccagcactttggaaggctaaggcgggaggattgcttaagccagggagtttgagatcagcctaggcaacatagtggaacttcgtctttaaaaaatattaaaaaatcaggagccgagggtggtggctcacgcctgtaatcccagcaccttgggaggctgaggtgggtggatgatttgaagtcaggagttcaagaccagcctgaccaacatagtgaaaccccatctcgactaaaaatattttaaaaatagccggatgtggtggttcacgcctgtaatcccaggtactcgggaggctgaggcaggagactcccatgaactaaggaggcagagcttgcagtgagctccagcctgggcgatggagggagactgtgtctcaaaaaaaaaaaaaaaaaataggcaggcatggcggcacgcacctgtggtcccagctactcgggaagctggggtgagaggattgcttgagcccaggggttgagactgcagtgagctgtgatcatgccactgcactccagccttgtcaacagagtgagagcctgtctcaaatcaaacacggccgggcgcggtggcgcatgcctgtaatcccagcactttgggaggccgaggcaggcggatcacaaggttgggagatcaagaccatcctggctaacacggtgaaaccccgtctctactaaaaaatattaaaaaaaattagccgggcgtggtggctggcacctgtaaatctcagctactcaggaggctgaggcaggagaatggcgtgaacccgggaggtggagcttgcagtgagccgagatcgcgccactgcactccagcctgggcgacagagcgagactccgtctcaaaaaaagcaaacaaacacaaaaaacacaccttcttcataacagacaggccctgccacccctgtgcctggctgagttcacaagtctgtttgtaacctgagcttccctgtcatttccctggctctgtctgctggctaagcttcatttccccaaagtaactaaagctttctgccaccgccctggccaccagggctgctggaactgccatagccatcttggtttcatgttttggcaaaatattggcctccatcaccataggggccagggcttctgcctccaaatcctcctcccttcatggatccaaaattcgaagactgattgctgttatggccaagattactacagcttttgccacctccaaaactacttccatcattactgtgatggggttttgtttgtttgtttgtatttgtttttttgtttttttgtttttgtttttgacagagtcttgctgtgtcgcccaggctggagtgcagtggcacgatctcggctcactgcaacctccacctatgggttcacaccattctcctgcctcagcctcccaagtaggtgggactacaggtgcccaccaccacatctggctaacttttgtattttgtatctcttcctgaaacacctgtgcagacacaaacagaaataatgttttaccagctatgtgggcaccccttaacccaatcaagttgacacatacaataaaccatcactgctgggtgcagcggcccacgtctgtcatctcagcactttgggaggccgagccacgtggatcacctgaggtcaggagtttgaggccaatctggccaatatggcgaaaccctgtccctactaataatacaaaaattagccaagcgtggtggcaggcgcttgtagtcccagctactcgggaggctgaggcaggagggttgcttgaacctgggaggcagaggttgcagtgagccgagatcacgccattgcactctagcctgggcgacacagcaagactctgtcacaaacaaagaaacagacaattagccaggcgtggtggcgcatgcctgtaatcccagctacttgggaggctgaggcagaagagtcgattgaacccgggagggagaggttgcagtgagccgagatcacgccattgcactccagcctgggcgacacagcaagactctgtcacaaacaaagaaacacaattagccgggcgtggtggcccatgcctgtaatcccagctacttgggaggctgaggcagaagaatcgcttgaacccgggaggcggaggttgcagtgagccgagatcgtgccattgcactccagcctgggtaacaaaaacaaaactccatctcaaaaaaaaaaaagaagaagaagaggaagaaggccaggcgcaggggcttgcacctgtaatcccagcactttgggaggctgaggcgggcagaccacttgagctcaggagttcgagaccatcctggccaacatggtgaaaccctgtctctgctaaaagtacaaaaaaaattaactgggtgtggtggcacatgcctgtggtcccagctacttgtgaggctgaggcaggagaatcgcttgcactgaggaggcagaggttgcagtgagccgagatcacgctactgcactccagcctggccacagagcaaggctctgtctcaaaaaaagaaataataatcttttggatgttgttcttcagtgtcctctaatgccatcaacaaagatacttttatatatatacacacatatagatatgtatatatatatatgtatagcatagttatcaaatttaggagattaaatactgatgtattacattttatttaatatgaaatctatgataagaggaagaaatcatacacacagttgacagttcagatttataaaaagcataaaattagcatagataaattattgatgactaatgacactagctataagtttctactgtagaatacgtcacaccgtgaatgtgggtcattttttccgccactagactgagtcattgagcacagaagatacatcaattttatgtgttagcaacatgtacaattctttttttttctttatttcttctaaaaaaaaaacaggatacatgtacagaacgtgcaggtttgtcacgtaggtatatgtgtgccatggtggtttgctgcacctgttggcctgtcctcaaagttccctccactcacccgatccttttttctttttttttttttttttttgagatagggtctcgctctgtctcccaggctagagtgcagtggtgtgatcacagctcactgcagcctcgcgtccaactcttgggctcaaatgatcctcccacctcagcctcccaagtagctgggattacaggcaggagccaccatgcttggctagttgaatttaatttttatttatttatttatttatttttttcatagagacagggccttgctattttactcacgctggtctcaaactcctcggctcaaatgatcctcctgcctcagcctcccaaatctgggattagacgtgagccactatgcccagcccagagcatttttatcacccaaaaatgaaactccacaaacattaagtaaacactccctgctctcctcttcccccagcctcgggcaaccactaatctaccatctgtctctgtgctgtacatttcatgtgaatggaattctgtgctaggtggcctcttgtgtctggcttctttcactcagcatcacatcttcgaggttcactcatgttgtagcatgcgtcagtgctgcatttttttctttcttcttttttttttttttttttttttgagatggagtctcgctctgtcacccaggctggagtgcagtggcacgatctcagctcactgcaacctccacctcccgggttcaaacgattctcctgcttcagcctcctgagtacctgggactacaggcacgtgccaccacgcccggctaattttttttgtatttttagtagagatgcggtttcaccatattgtccaggctggtcccgaactcctgacctagtgatccgcctgcctcggcctcccaaagtgctgggattacaggtgtgagccaccgcgcctggctgagttctgtacttttaagcttttctcttgacataaaattcagacgcgaaatgcagtttccgtgcagtgaggcacacaaacacctttgctgtggattccccatttcgcacatgggaacagatgcattttcccaggcaattaaataccaaggacttcctgaaggcactgagtgtccaggccaccgagtttgtccttgagtagctgtaaacaccctcacccccgggtatccaggaatctgcccgatgccctggtggccagctccaggcattaacagcttcctccccatttccagcagtttccttcagttactgagtggaaagttactgagtcagaggctgcggagatgaggttccttggcagatggctttcatttttacctctccctacctccctgtcgtccacacagccccaacacacacacacacacacacacacacacacacacacacacacacacttacacacacacagacctgttttctttttctttttttttttttttgagacggagtctcgctctttcgcccaggctggactgcagtggcgctgtcttggctcactgcaagctccgcctcccgggttcacgccattctcctgcctcagcctcccgagttgctgggactacaggcgcccgccactacgcccggctaattttttttgtatttttagtagagacggggtttcaccgtgttagccaggatggtctcgatctcctgacctcgtgatccgcccgcctcagcctcccaaagtgctgggattacaggcgtgagccaccgcgcccggcctttttttttttttttaatttttttttttttttcaacccatgtggaccaggttggcctcgaactcgtgccctcgaaccctcgcctccctgagggtccgagggcccgcgcaaccggctggagccacaatggctccacctgttttcttatctacaaaacatctgtttttatttaatatacatcattttatttaatatgggagggagaagaacagcagaaatagctccttaaagccccgttctacaggatgtagtggggaagagggaagctctgacgttagtctctcccttcatccatttcttttataaactgcctgctctatttttataaacattttgtcctggataaaccttcccaaaggccataatatacaatgaagaaagactaacagaaagcaaaacactaaacccttcttcctgaaaaaagataccacatacaaagtcaaaagacaaaagcagcctggggggaatgtttgtgacatgtatgacagactgtggatccacaataaataaagagctactacaaataaacaagaaaatgacaaacagcacaggaggaaaatggtcaaaaggtttgtaccaacacagaagaggaatatgaatgactagtaatgttcgacctcattggtaaccaggcacaataaaataaacatagtgagatcgcacagtagcaaagctacatggaaacagggggtctcctcctatgctaccagagagtaaaaatcagcacagcccgtttggagagcaattggggtgaacctatcaaatgacctgttacagatacatgtacccttcagcccagagattcatttccaggtacttaccctccacatgtatgtgaaaatgcacgtgggcaaagacattctttcatcttcattaggaggagccacgcaggcctggttaagtaacataggatgcacccacataacgggattccacacagactatacacagaatcacctccaagatgcactgatagcaagctgcagaaccacatacggtgtgatcctaagacatcgaaaaaaccagttatatcctcacaagtacgtgcatgaaatttatttatgtatttatgtgttttatttattaatttgtttccaatatggagcttcgctctgttgcctaggctggagtgcaatagcacaatcttggctcactgcaacctccgcctcccgggttcaagcgattctcctgcctcagcctcccaagtagctgggattacagggatgcgctaccacatcggctaattttttgtatttagtagagatgtggtttcaccatgttggccaggctggtccacccacctcggcctcccaaagtgcggggattacagatgtaagccactgtgcctggccttatttctttattttgagatagggtttgttctgttgaccaggctggagtgcagtagctagatcttggctctctgcagcctcaataccttgggctcaagcaatcctcccatctcagcctcccaagtagctgggatcgcaggtgtgatacctaccatgtccaggatatttttcttttttttttttttggtggagatgggggtctcactatgttgctcaggctggacacgaactcctggcctcaagcaatcctcctgccctggcctcccgaagtgctgggattataggtacgagccactgcgcctggccgggttcattccttttcaatgttgaggagtgctccattgcctggaggggccagagtttgtttttctattcatttttgaagaatatttaggttgtttccagtttttggtgaataaaaccactataaacattcgtgtggccaggcatggtggctcacgcctgtaatcccagcactttgggaggccgaggtgggcggatcatgaggtcaggagatcaagaccatcctggctaacacggtgaaacttgtctctactaaacaaaatacgaaaattagccgggcgtggtggcaggcacctatagtcccagctacttgggaggctgaggcaggagaatggcatgaacctgggaggcggagcttgtagtgagccgagatcgcatcactgcactccagcctgggagacagagcaagactctctctctcaaaaaaaaaaattcttgtgcattttcgttgtttttctgtttacaactacaaggtaaatgtcattcattcaggtgttttgtaacatctttgttgacatatatttacataccattcaattcacttatttaaaatgtatacttcggccaagcgcggtggctcacgcctgtaatcccagcactttgggagcaggaggggggtggatcacgaggtcaggagattgagaccatcctggccaacatggggaaaccctgtctctactaaaaatacaaaaattagctgggcgtggtggcgtgcgcctgtagtcccagctacttgggaggctgaggcaggagaatcccttgaacccgggaggtggaggttgcagtgagccgagactgtgtcactgcactccagcctagcgacagagggagactccactaaaaaaaaaaaagtatacggccggccgcagtgactcacacctgtaatcccagcactttgggaggccaaggcgagtggatcacgtgaggtcaggagttcgagaccagcctggccaacatggtgaaaccctgtctctactaaaaaaaacacacaaaaaaattagccaggcatggtggcatgtgcctgaagtcccagctacttgggaggctgaggcaggagaatcgcttgaacccgggaggtggatgttgcagtgagctgagatcattgcgatcatgccattgcattttagcctgggcaacagagcgaaattccctcacaaaaaaaaagaaaagaaaagaagttaagaaagacagaaaagaaaaggaaaagagaagagaagagaagagaagagaaaagaaaagaaaagaaaaagtaaagaaagaaaagaaacccaagccaggttcagtggcttgcgcctgtaatccccgcccctcagaaggccagggcataccaaagttattgaaataagaaatcaagaaagagagaaaaaaaaaagaaagaaaaacaagtaaaaaggaggctgaagcaggaggattgctcaaggccaggagtttgagaccagcctgagcaacatagcgagaccctgtctcgaagaaaaataattttaaaattggccaggtttaaaacaggcacagtggttcacgcctgtaatctcagcactttgggaggccgaggcgggcagatcacgaggtcaggagatcgagaccatcctggctaacgtggtgaaaccccgtctctactaaaaaatacaaaagattagccaggcgtggtgggcacctgtagtcccagctactcgggaggctgaggcagaagaatggcgtgaacccgggaggcagagcttgcagtgagccgagattgtgccactgcactccagcctgggcgacagagcaagattctgtctcaaaaaaaaaaaaaattaaaattaaagtttttaaaaaaattggccaggtgtggtgatgcacacctgtagtacaagatactcgggaggctgagggaggaggatcactggagcccaagaagtcgaggctgcaatgagctatgatcacaccactgtctggcagacagagtgagaccctgtcttctaaaaacaaaacaaaacaagaaagaaccccagtaccctttagctatcatctccctcccatttcccctgggttctgacaacccgtcatcattttctgtctctctgcacttgccttttctgcatgtttcctataatggatcattcaatatccggccttttgtgtctggcttctttcacttagcttaatgttttccagcttcatccatgtcaagtgttacagtagctagttaggcacattttttttttctttttttttgacgaagtttcactcttgttacccaggctggagtgcaatggcgtgatctcagctcactgcaacctccaccctccaggttccagcaattctgctgcctcagcctcccaagtagctgggattacaggcatgcgccaccacgcccggatacttttgtatttttagtagagacggggtttcaccacgttggccaaactcctgacctcaggtgatccgcctgcctcggcctccaaaagtgctgggattacaggcacgagccactgcacccaagctctgctcccaattcttgacctcttacatcagatttggcacaaaactgtcccatgccccacatattaaatgatcctatttatatgaactgcccaggcaaatccaataagacacaaagtggagtagtggttgccaggtgctaggggaattgaggggtgatggctgaaggataaggtttctttttggggtgataaaaatattctaaaatgggttgtgatgatagttacccaactctgtgaatataacaaaaaccactgaattgtaataccataaatgggtgaattgtatgtatcccaaaaaagctgttaccaccatcccccaggttctccaaaatgaaacatccttcccatagcgggcatcagacacagaataaacccgagcaggccctgtgtgatcggacttcccctcccatccccagtcccactctgaaccatctcgaacccccttctgcttactctgttccagccacactggccttcttgcaagttctgcctcagggcctttgcacttgctgttccatcggctagaatcctctctctggttaactcggctagcagagtgtgattttgaccttaacaaaaccaatctcccctcccctcccctcccctctcctttcctttcctttcttcttttgagacaggtttcaccatgttggacagactggtcttgaacacctgggctcaagtgatccgtccacctcgttctcccaaagtgttgggattacaggtgtgaaccatcatgctcggcccaaattcttttcttttctttttttttttttttttgggacaaaaagagtctcactctgtcgcccagactggagtacagtggcactatctcggctcactgcaacccagcctcctgggttcaagtgattctcatgcctcagcctcctgagtagctgggattatcggtgcccaacaccacacttggctaatttttgtacttttagtagagatggggttttgtcacgttggctaggctggtcttgaactcctgatctcaagtgatctgccaccttggcctcctaaaatgctgggattatagatgtgagccactgcgcccagcccccagttcttacatagacaccatataagtggcaggcagaataatagcacgccctaaatgtccacatcctcatctccggaacctgtagatgtgttgtcttacacagtaaaagggactttacagttgtgattacagtccgggtcttgatatggggagatgatcctagattatccaggtgggacgaatgtaaccacaggtgtccttatcagtaaaagcaagcggcaggaaaatcagtcagagccagagagagagagactggaagatgctccgcagctggcttgaaggatgaaggatagggttacatgccaagaacaggaggcaacttctagaggctggaaaaggcagggaaggattctctcctagatggtccagacagctctgctgacaacttgattttagcccactgaaacccatttcagatttcattgagaataaaattgtgttgttttaagccgctaagtttgtgataatttgttacagcagcaataaaaaactaacatgctagtttatatttataaaaagaggctgagcaccatggttcaggcttgcaatcccagcaatttggaggctgaggcgggcggaccatttgagctcaggagttcgagaccagcctggccaacatggtgaaaccccgtctctactaaaaatacaaaaattagccgggcatggtggcaggcgcctgtagtcccagttactcgggaggctgaggcaggagaatcacttgagcctgggaggtagaggtggcagtgagccaagattgtgccattgcactccagcctggggagtgacagaataagaccctgtcaaaaagaaaggaaggaaggaaggaaagaaactgacaggggccagggtgttctcagcttgcgaaggatgccaggcataggtgtggccagcagcccccacactctgctctcagtgggcatcgggggccccttaacttcagagggccctagaaacactcaggggtggcttctatcatcacaatggccagaaggccacttctggcacttggtgggtggaagtcaaaagtccatccacttctggagcagcctcacaatgagggattgtcctggcccaaatgccagcagtgctgttgccaagaaacacaaatcatcaagcccagtgcctacatttccaacaaccaccggggcgagcagataaaaatgagggttctggagctacccacctggcttcaaaactggctcaaaacaaacctggcttggctactgactagctacagaccttggtcaagtcgtcttttttttttagatggagtctcgctctgttgcccaggctggaatgcagtggcacaatctcggctcactgcaacctctgcctcccgggttcaagcaattctcctgcctcagcctcctgagtagctgggattacaggtgcatgccaccatgcccagctaatttttatatttttagtagagacagggtttcaccatgttggccaggatggtctcaatctcttgacccgcctcagcctcccaaagtgctgggattacaggcgtgagccgctgcgcccagcctggtcaagtcttttaatgttcctgaaacattcctggaacaatgttctcacttggaaaatggggataataacagtcctgtccttggccggatagagtggctcacgcctgtaatcccagaactctgggaggccaaggcaggaagatcacttgagccaggagatcactccagcctgggcaacagagcaagactccatctcaaaaaaaaaaaacttagctgggcatggtggcacgcacctgtaatctcagctactttggaggctgaggcaggagaatcacttgaaactgggaggcagaggttgcagtgagccgagctagcgctattgcactccagcctgggcaaaaagagcgaaactccatctcaaaaaaaaaaaaaaaaattaaccaggtatggtggcacacatctgtagtcccagctacttgggaggctgaggtgggaggatcaactgagcccaggaggtcaaggcggcagtgagccatgatcctgccactgcactccagcctgggcaatagagtgagaccatgtctcaaaaaaaaaaaaaatagtcccagacttataatctagtgagctttaagtaaggtaagacatgtcaattgcttagaacaatgcctgggagagggtgagtgcccttcagcattagctgagtattgttattttagtagcaagtgcctggaatctaaacccatcaccccttccagcctgggggcccttggtgagcaggagcaggtctgaagagcacctgggtgtctcaccttgctcagcacaatgaggggcgtttgttgactgactgactgatggactgaaggcaaggcatcctaggtatctggttcccaggggagacaggcaagggctcaaagacggcaaggccaggcaggaccacaggtttattggggactccacgcacagacgcttatggcatcacacgacaacggcacggttactcgggacacacacggtggcctctgcccacagccagggcccagaggcagtggggtgcagtctcctcccttgtggcccagacccagctgggtcccttcctcctaggcagctgagggaaggactgctgggttggccacgggcctgggaaggggaagcgagcaggcgagtccaggaggggccggggccggggtggggctcgcctgccctcactccagggactgtagcatcagcagctgtttcagcaccttcgtctggctggtctctcggatttcgccagccaggaacatctcgtccacgaccgtgtaaacctgtgtgaggggagaccctggggtgagacgaggccccccaggatgctggcccggaccctggaagctggggctctgatgcccctcgagctgggacacagacctcagcagaggctccgggtggctagtgcaccacgggtcccccccgtccccctcctctggctccttcagcctcctcttcaccaggagcctaccttgtagaagttgaacaccaggtccagttcacagacattgtggaaatattcgtttaagacctgggagaggaaggcagagatggtaagagatgggcagggagagagccacacacgcacagagatgggaacaaggtcatcagaaagagacagcaaaaaaagagaccaagggggaggcaggggagagagagagacagtgacagggagagaggcaaggagacacacagagagaaacaaaagcaaagatcgatgcaaagagatggcaaaaggtcaggcgcggtggctcacacctgtaatcccagcactttgggaggctaaggcagaaggatgacttgaagttaggagtgcaagaccagcctggccaacatggtgaaaccccatctctactaaaaatacaaaaattagctgggcatcgtggcgtgtgcctgtaatcccagctactcaagaggctgaggcaggagaatcacttgaacctgggaggtggaggctgcaatgagccaagattgcaccactgcactccagcctgggcgacagaacaagactccgtctcaaaaaaaaaaaaaaaaaaaaaaaaaaaaaaagaaaaagaaaaaaaagaaatggagagggagagtcccagtcactgcagagggagggctcaggagggaccagggagggttcccaggccttgggggccactccagggctgcccacccgcctccccaccttacatccctctcccgccgtacctccacgaagttgtgaatggcctccaggtaagccaggttgttgtcattgacatccacacagatgcagaagtagaggccagcatagcggcggtaaatgatcttaaagttccggaactgcagaacagagaggctgtcagcaacggagattgccaggacctaacgtgccagacagagtggggccaaaacattcactccttcactccatacgtggtcccgaggcccagctctgtgcctggccctgtgctggggtcacagcagtgaccgagacagccctaaccctgctcacagtgcagcgggggcaggcatccccagaatggacaggatgggctgtgagagcccaaagagggtgcctaaccccctctgatcctggagagtcaggagggcttcctggaggagggggtatcggagctgagagctggaggataggcaggaatgttctaagcagatagcaaaagcccggggctgggcgggagcctgacgtgttcaatagtgtccatgcaaccttgccactcccttctgtgacttcctgctacctctggagacagtcacatcccttagcctggaattaattaactcaattatttaacaaatacttcctgagcagctactctatgccaggcctgtgataggcagtgtggggaggagggttaccactgccaccaagacgatcctgggtccttgtcctgccctcactgaaatgcgatatacacagttagcaatagtaacacagacacacaccgtgaacaaacatgccaggatcagggacatggattctcattttatgcgcgtgttaagtagacaaagacagatatatatgcatactgggttgcaaagtacaatgtctttggccaaaacctgaaaatccagttcagttctatatgttctcaatgtcaggttcattacaaaaaaaaaaaaaaaaaaaatcccagcactccaggaggccgggcgagaggatcacttgagcccaggagtttcaggccagcttgggcaacatggtgaaaccccatctatacaaaagtacaaaacttagctgggtatggtggcgtgtacctgtggtcccagctactcgggaggctgaggtggggagatgacctgagcctgggaggtcaaagctgctgtgagccacgttcccatcactgcactccagcccgggagaccctgtctcaaaaaacacaaaaaaacagcagctctaggtctggggtgtgcctgtgtcgccacctgctgacagctatgagtgccagcatcagtcttcggcatttttttttttttttttttttgagtctggctctgacgcccaggctggagagcagtggctcgatctcggctcactgcaatctctgcctcttgggttcaagcgattctcctgcctcagtctcccgagtagctgggattacaggcgcgccaccacacccagctaatagctttttactcattttttcagctcaatctcttgttcattgctatactccaagcatgttttcagggttttttttgttttttggtttttttgagacagtctcactctgtcgcccaggccagagtgcagcggcgcaatcttggctcactgcaacctctgcctcccaggttcaagcaattctcctgcctcagcctcctgagtagctaggaatacaggtgtgcaccaccacgcctggctaatttttgtatttttagtagagatgaggttttaccatgttggccaggctggtctccaactcctgacctcagatgatccacctgcctctgcctcccaaagtgctgggattacaggcgtgagcccagcctgagtatgttttctggtgtgattacagtaaggcctacatgtaatccacgggtaaatgagctgacactgatcatcagtgctcctctcttcttgcaatccagcttttctggctctcaccctcctccgcctccagctactgctccatctttccagcctcccttcctgttttaaatttcgaggcttctcagggatctgctgcagacccccatctctcctccagctacattctctcagagaagcacattctctcatcctgcaggctggggcaggtgtcccctctgaacatcccacgccactgccccacccctgccctgccccagcctgaccactgctggtcgccactgtctggggatgggtctgtctccccattggactgagcctgtgggggaagctggagctgtcacactgtgtcctccatgttgccctgcaaagggctggcacaggtaatggcccccaaagacatccacatcctaatcccacaccctgtgaatatgggaccttatatggcaaaaagggactctgcagtctcaacttgtgacgaagttaagaagcatgagatggggcgataatcctggatggttcaggcgggaccaatgtcctcactgggctgctaataaaggaaagcgggaggcgggacagtgcgagtcagacagagattggacgacggccaggtgccgggcctcatgcctatcatcccagcactttgggaggccaaggcttgatctcaggagttcaagagcagtttaggcaacatatcaagacccatctctataaaacatacaaaaaattagttgggcgtggtggcaggtccctgtagtcccagctactcaggagtctgaggtgggaggatcccttgagcctgggaggcggaggctgcagtgagctatgattgcaccactgcactccggcctggggcacagagtgagaccctgtctcaaataataataataataacaagagggatagcccgcatcttccagttgcctactcctccctttgatcttcactcacaagtcccctccaggaagccctccagacccccaggctgggtcaggtgccctcccccagccaggctcctcgatcccagccctgcctactgtggttgtcactgtctaggacaggcttgtgttccttcctgggctatgagtcccaaagcagcacaaggctgtctcagtgctgctgtgaacctagcactgggctgatcacagaggaggcacacagaaacattaggtgaatacatgcacaaaggaacaactgaatgaatgggcgggcctggatcctggaggcatggaggaactcaagacctgagggtcagcctcctctgtaacattctcatttgcccagccggactttccggctgcccctgtatcattgggcctcactgacccctcccgcgccccagccctcagcacaggaccagccactacattagcagcaaggtgcccacacagccagaacacccgacacccagttcctctcccccttcccacctgctgctcttggtgacaccaccagtgacctcctcctggagaggtaagtccaaccctgtccccctcctggctgctgggacacccaatctcttggttctcctctccctcatctctctgcctgcagacgtggccctctggtgctctcctcggtctatcctcacttccccggtgagctccttggcctcggtttccctctatgtgcagaaatgccgtttccatatcctacccagctctctccaagaaccctgactcgtcacttcttcctggacatctctgctgggatgtggacgatactcggggccagacccccaacacttccctcctgatcttcacctccgcctgcccttcccatctgcccatatcagataatgacagctccatcctacccgggggctcaagtgggaaatctaattgtcgccctggctctgctttctctcacattccacatccaattcttggccattcagctgggtccacctccaaaacgctcctggccacaccgacggcttccatgctggtccggtcaccagcatctcccacctggaccactgcagccacctctctccgagcagtctcctctatgctcttgccctatagcgcagcctcaagtcggccaatggccatgctctgctcaaaaccctccatggttcaagaccagcctggacaacatagcaataccccatctctacgaaaaatttaaaaattagccaggcgtggtcactcatggctgtaatcctaggactttgggaagctgcggtgggcggatcgctggagctcaggagttcgagaccagcctgggcaacatggcgaaaccctgtctctaccaaaaatacaaaaattagtacggcattggtggcacatgccaatggtcccagctactcgggaggctgaggtgggagaattgcttgaccccgagaggcagaggttgcagtgagctgagatcgcaccactgcactctagcctaggtaacagagtgagaacccacctgaaaagaaaaaaaaatttaaaaattagatgggcatggaggtgcatgcctgtagtcccagccacttggcaagctgaggtgggaggcttgcttgagcctgggagggtacagtgagctgtaattgcaccactgtactctagcctgggagacagagcaagaccgtgtctctaaaaaacaccaaaaaacaaaaacaacctttcttttttttttgagaggagtcttgttctgttgcccaggctggagtgcaatggcacgatctcggctcactgcaacctctgcctcctggattcaagcgattctcctgcttcagcctcccgagtagctgggactacaggcacccacgaccaggcccggctaatttttgtatttttagtagagacgagatttcatcatgttggtcaggctggtctcctgaccttgtgatccacccaccttggcctcccaaagtgctgggattacaggagtgagccaccgcgcccggccggcaaaaacaacttttctacggctcccatctgactcatagtaagagcccaagtcttccctgcagccctgcaccaagagattaccctgttatcttctctctttcatctcctccccttcctggctgcattcctgctatccctggaacgccctaagtattctcctgccccagggactttacacttgctgttcccttggcttgaaatgttcctctcagacattggctccttcctccccgtcaagtccttcaggtcttggctccaatgtcaccttttcagcaatgccatcctaaccaaaccatttaaacctgcatcctggctgggcgcagtggctcatgcctgtaatcccagcactttgggaggccgaagcaggcagatcacttgagctcaagagtttgagaccagcctgggcaacatggtgagaccccatcgctaccaaaaatacaaatattagctgggcttggtagtgcacaagcctgtagtcccagctactcaggaggctgaggtgggagggtagcttgaacataggaagtcaaggctgctgtgagccatgttcgtgccactgcactcccgcctgggtgacagaatgagctcctgtttcaaaaaaaattttttaaagagggacaggcatggtggctcacgcctgtaatcccagcactttgggaggccaaggcgggtggatcacttgagatcaggaggtcaagaccagtctgaccaacatggtgaaaccccatctctactaaaaatacaaaaattagccaggcgtggtggcgagcacctgtaatcccagctcctagggaggctgaggcagagaatagcttgaaccctggaggaggttgcagtgagccaagattgcccccattgcactccagcctgggtgactgagacagactccatttcagaaaaaaaaaaaaaaaaaggcaaaaaaggccaggcgcagtggctcatgcctgtaatcccagcactttggaaggccgaggagggtggattacaaggtcaggagttcgagaccagcctggccaacatggtgaaacctcgtctctaccaaaaatacaaaattagcctggtgttgtggtgcacgcctgtaatcccagctatttgggaggctgaggcaggagaattgcttgaacctgggaggtggaggttgcagtgagctgagatcatgccactgcactccagcctgggtgacagagtaagactctgtctcaaaaaaagtaattaattaattaattaattaattaattcaattcaatcaaataaaaaataaagacaaggtcttgctacattgcccaggctggtcttgaacacctgggctcaagcaatcctcccaccttggcttcccaaagtgctgggattacaggcatgagccactgcacctggcctattctctctacttttctgtgtttgaacattctataggaagtttgaaaaacgcaccagcaaaaaaaatttgaccaaaaaaaaaaattcttttttaatcgtaggcaaaaaaaattaataataacaatgcagaacaaaaaggcaaaatattaatactgattaaatctgggtagtaggtatacgaatctccaatctacttttctttcattgtactaatctgtatgtttatgatttttcacaatgaaaagtacaagtaaaggaagggaagaagcaagcaagctcaaagcaggttgagtgaatgatataggatggatagagggtccaaggggttcttgcaactagaagctgggcagggagtggcgaagtagggcacgaggaagcagcggggtgcaggaggcatggagcgggcgtcacctccacaaagttggtgtgtttggcgtctcggacggtgaccacggcatgcacctcctcgatcagcttctgtttctcatcatcatcaaactgcatgtaccacttggccaggcgcgtcttgcctgcccggttctggatgaggataaagcggatctgggggcagcaggaggagaaggaggaagtgagagaggcagagagggcgggttgggtgctgcccaacggccccacccatccacccagaggggagatagggctcagggcctccctgctgcctgacttccaggggtctcggctgctccccagacccaagccaggccggcctggccacacgcttcatcccgggtccctccagcacccctgtggagtgacttcccttccacaagtctccaactctggagtcagctccagggccccgagtcccaggctcctccaccacctcttatctctctctgtttttttttttttttttttttgtagagacagagtcttgctacgttgctggtctcaaactcctggactcaagcaattctcccacctcggcctcccaaactgctgggatcacaggtgtgagccactgtgccctgctttgtctgcccctctaggcctgtttcctcaccagcaaaacaagtctcccaagaagattcatctcaccagggtggttttttcattatattttttgttatttttaaattttcagacagtgtctcattctgtcacccaggctggagtgcgatggcgcaatctcggctcactgcaacctccgcctcccaggttcaagcgattctcctgcctcagtgtcctgagtagctgggactacaggcacccgccaccacgcctggaaaatgtttgtatttttggtagagacggggtttcaccatgttggccaggctggtctcaaacttctgacctcaggtgatccgcccgcctctgcctcccaaagtgtggggttataggcatgggccaccacgcccagtcagccagggtttttttaaaggttaaaaaaaaagtttataaacttagttcggtggctggtaggtggtagatactcaataaacatttgaggttcagactcctttgggctaagtctcagctctgccacttctttttttctctttgcttcctaactttttataaaattgaaatgtaattcacacaccataaaatccatccacttaaaatgtagacagttaaatggtttttggtatattcacttagtatatattcacagttgtgtaaaaatcaccacttttttttttttttttgagacaggttctagctctgttgcccaggctagagtgcagtggcgcgatcccgcctcactgcaacctccacctcctgggtgcaggcctcccaggtagctgggaccgcaggtgcacaccaccacgcccagctaactttttgtatttttagtagagacagtgtttcaccatgttgtccaggctggtctcgaactcctggcctcaagcgatccacccacctcatccccccaaagtgctgcatcaggcgtgagccactgcaccccacctaatatcaccactatctaatttattatctaataccagaacattttcatcatctccccccaaaaaactccccacccattagcagtcactctccgttcccccagggcctggcagccacgagtctcctttctgtctctgtggatgtgtctgttctggacattgtatatgagtggaatcatgcactctgtggctttcgtgtctggcttccttcactcagcgtgacgttttccaggctcatctgtggggtggcaagcggcagagctgcaattcctttccgtggctgagtgatcctctgttggatggataaggccgtacttcgggcatttgggttgtttctgctttagggctattatgaataatactgctatgaacattcgtgtatgagttttcgtgtggatggatcatttctcttgggtatatacctaagagtgagattgctggctcatagggtaacgctatgtttaactttctcaggaattgctaaaccgttttccaaagcgtctgccactttcatgacttaactttggtgccactttggtgcctgagtttactgtgaggagtaaaggatattcctggccggtcacggtggctcacacctgtaatcccagcactttgggaggccaaggcgggcagatcacttgaggtcaggagttcgagaccagtttggccaacatggtgaaaccccatctgtactaaaaatacaaaaattagccaggtgtgatggggggcaggggggaggcggctataatcccagctactcgggaggctgaggcatgagaatcacttgaacccaggaggcagaggttgcagtgagctgacattgcaccattgctctccagcctgggtgacagagcgagacgctgtctcaaaaaaacaaaaacaaaaacatagaggtatagtacagtgactggcacgtactaagtgttacataagaaccagctcttagcagcattatattttccattatgtgatgttcagaaaaccatggccaaagcttactccattagaagttctgggcccatttctgtctgagacaggcatgctcatgcccattttatagatgaggaaactgagatttagggaaaggaagtctcacagccagaaagcagaggtgggagtccaaaggctttgctctgaaccacctgaccccaacttgtgggagccttctctcttaggaaagagagccctctagtcctgtctttttcttttcttttttgttttcagacagtctcactctgttgcctaggctggagtgcagtggcactgtctcggttcactgcaacctctacctccaggttcaagcgattctcctgcctcagcctcctaagtacctgggattacaggcgcatgccaccatgcccggctaatttttgtatttttagtagagacagggtttcaccatgttggtcaggctggtctcgaactcctgaccttgtgatctgcctgcctcagcctcccaaagtgctggggttacaggcgcgagtcactgtgcccagccttttttttttttttttttttgagacagagtctcactctgtcgcctaggccagtggcacaatctcggctcactgcagcctctgcctcccgggttcaagcgattctcctgcctcagcctcccaagtagctgggattacaggcatccaccaccacacctggcttatttttgtatttttagtagagacggggtctcaccacgttggccaggctggtctcgaactcctgaccttatgtgatccgcctgcctcagcctcccaaagtgctgggattacaggcatgagtcaccgccccagcctgagagtctttcctaagcctcattctccacacactctatcctccctcccccaaccaaccaaactggaccggaacaggatgttacactctccttccaagaactcctgctgagccagggaaaaccacttcctagcagggcaggggtcccaggcaggaagggacgttggggggcctacaccaggcagccacagcctgggagcagagccggagacatattcacacagttaggagaactagaagcaaacccacagagttgacaaaaagctctgcctcttactcccaaattcccttgtatacctctccctgttttcttcccatttggaatctcaagtcccctccgtcctgaatctctgcatcctcacgcctctgctgtcccctctagatgccccccaaccttccctgtctccaatccccctcctctggagttgttcccttttgacctccactttctcagtctcagttcccctccttggggcctcaatgggctttttactggtgacatcccttgtcccactcccaagcttcctcccttcttcaaaaggtcacattttgcctccaaggaccctgttcctggaggagactccgcccccgctctgacactctttctcattcgttttctttcccaacttccagcccaaagaaccctttcctagatccaaagccccaacctgggggataggggcactcctaaatccaatgttgagtctttgccccaacaaagattcctccccaggtctcacactttcaagcctactccccaccccacaagatctctcctcttggaaagacctattcagttgctccccattctttccgagtgtccatcttacctccaggtcctctctccttttacagcgctttcccagacccttaagtttcattccctacagttgcctccttttggtttcctgtgccaggtctcttcttgagatcatccctctctcacaggcagtctcctgcccctgtctcaacatcccctctccacctgcaatcagatccttgtctctagagactcctcccatcaagaaaacctccctccccttttccaaggtctcgcgttctcgtcccagcgctcccgccacacttccagagcgccttcctctttcggacgccctctccccacctccaatgccttctcgctacccacaagactgtgtctcacgagtttcctctcgtttcaaagcttccaaccatctacaacgtttcccacctgcacagccctttccccttggaacaccacccccaatgcccgtcgccgcgagacccctggtaacccccgcgcgcagaatcaccgccctgtgccctccttcccggccctggatcggtcccaatccccagagcccgcgcctgacccagaccatccgcggcagagaagggacttgtcagcgcccgatccagcctcggctatttacgcgtgggccccccctccgccagtccccggcgtagcgctcccccgttaccatggcgacccccgtccagaccccagcggccccggtcccgcggcgactgggcagctccggctcagggtgcagttgtagggcccagagctagagcggacttccggtagaaaaacccgcctgccttctcgcgcacagacccctgggagttgtagtttcaccaaaggggccagcctgggtgaagatgggtgaagagtcagagccagtccttttcctaccaaacgagtcagatcccaagtgcatgctgggatttgtggacaaacatctttacagaggactacaattcccgagatgctgaagaaccagcggtgaaggcgttgcattcagggaaatgtagttctcttaggtcccctccccccacccaggggagaagggcatgctgggaatagtagttttaaattttaaaaaactgtcctggggagatagaaaatgtctttccattcctcatccagtgatttctttaatttttttaaaaatagagacaggggtctagatatattgcctaggttgatctcgaactcagcttcaagcgaccctcagccttccaaatcaccaggattacaggcatgagccaccacaacaccaagccagtgttttgcttaaaatacgttgcgtgtgtctctcgggagacaacagtttaaaagcataaatttgaaccggcccggcgcggtggcttactcctgtaatcccagcactttgggagtccgaggcaggcagatcacttggttaggagttcgagaccagcctagccagcatggcgaaaccccatctctactaaaaatacaaaaaattagccaggcatggtggtgcgcacctgtagtcccagctactcgggaggctgaggcaggagaatcacttgaagcccggaggcagaggttgcagtgagcccagatctcgccactgcactccagcctgggcaatagagagagactccaaaaaaaaaaaaaaatctctagtttggcgggggcatgatggcccatgcttgtaatcccagcactttgagaagctgaggtgggtggatcacctaaggtcaggacttcgagaccagcatggccaacacggtgaaaccatttctactaaaaatataaaaattagctgggtgtgatggcaggtgcctgtaatcccagcaactcgggaagctgaggcaggagaattgcttgaacctgggaggcagaggttgcagtgagccgagatcacaccattgcaccctagctggaatgacaagagcgaaactctgtcaaaaaaaaaaaaaaccctccaggtcagcagttagtttagtgtttttttggtgtgtctttgtttttgcttttttctgaaagagggtctcccttggtcacccaggctgtagcgcagtggcatgatctcagctcactgaagcctcaacctgctgggctcaagtgatcctcccacttcagcctcccgagtagctgagactacatacacatgccgtcacacctggctaattttttgtactttttgtagagacagggtcttgctatgttgcctaggctgctcttgaactcctgagctcaagcgatcctccctcctccacctcccaaagtattgagattacaggcgtgattttttaaatggcctttattacattttaaaaattattttatttgccctatgagtatgtgtgtatgtttgtctagatctctcattaggtagtgagttgttgagggcagggaccctgtctgataactgtatcttcattacctagaacatgacagatggtaagcagtcaataaagttattactattagtactgaggggagattggccctaataagaacaaagcatgccaggcatggtggctcactccagtaatctcagcactttggaatgccaaggcaggcagatcacctgaggtcaggagttcgagaccagcctgcccaacgtggcgaaacagcacctctaataaaaatacaaaaattggccgggcttggtagcacttgcctgtaataccagctacttgggaggctgaggcaggagaagcacttgaaccctggagatggaggttgcagtgagccgagatcgtgccactgcactccagcctgggggacagagagagagagagactccatttcaaagaaataataataataaattaaataaataaaacaaaatgtattgtagaattatgtaaatttaaggtatagtactggcagaataaccaacacatagttgttgaatattataggggcaaaaagaggccagagatcatttctgtcttgtgtacttttctgtctccaacagggttgatactaggatgacacaagcaaagtgtccaggttgcaaaattttaaaaggacctcactcttagatgccaattcctgtcttacacaggactgagaatatgtgcctcattaaattttgtgccctcaacacgtcacttgcctccccttagtcccagtcctgatctccagtgttcaacttaatacttggcacaactctggtgttcaataaacatttgctgaatgaatgaatgcatttgcagcaagaaaacagacactgcccccaccctcacagcattcacagtctagcaggaaaaatggacttaaatgacataacataaataaatttaaggccaggtgcagtggctcatgcctataatcccagcactttgggaggccgaggtgggtggatcacctgaggttgggagttcaacagcaacctggccaacatggtgaaaccccatctctattaaaaggacaaaaattagccgggcatggtagcgtgtgactgtactcccagctacttgggaggctgaggcacgagaatcacttgaacccgggaggcagaggttgttgtgaactgagagtgtgccacttcactccagcctgggcaacagagtgaaactctgtctcaaaaaaaaaaaaaaaaaaaaaaaagaaggccaggcagagccaagtggatcacctgaggtcaggagctcaagaccagcctgatcaatatggtaaaaccccatctctactaaaaacacaaaaattagccaggcatggtggtgtgcaactgtagtcccagctgctagagaggctaaacaggagaactgcttgaacccaggaggcagaggttgcagtgagccaagatcgcgccactgcattccagcctgggctacagagcgagactccatctcaaaaaaaaaaaaaaaaaaaaaaaaaagatattagccagtgctacagccacgagaacactatctttttttctttctttcttttctgagacagggtctcgcactataacccaggctggcatgcagtggtgcaatcacagctcattgcagtttcaacctccggggctcaagcaatcctcccacctcagcctcctgagtagtgggaactacaggcacgtgccaccatgcccagctaatttttaaattttttggaaagaagaggtcttgctatattttccaggctggcatgtgaatgcttgactggagctgaaggacctgtattccaggtggctcgctcctgtggttggcaaatgaatgctggctattggccagagacctcagctcctcaccacgtgaatctgtccacaaggacatatgaatgtcctcacatggcagctgttttcccaaagagtgagtgatctaagaaagagcatggcggaagctgctatgtcttttatggccttgcctcagatcttttatgacactgtcatttccacaatgttccattggtacctaatcagccctgtccaatgcaggaggcaatgcaaataccaggtgagactcattggggtccatcttggaggctggctgccacaatggctcataacaggcacctagctgagttgaagagttagtgacagcttcctagaaggggtgacatttgagctgagatcagaaggacgagtggagccgggcatggtggtgcatgcctgtaatcccagctactcggaaggctgaggcaggagaatcacttgaacctgggaggcagaggttgcagtgagccgagattgtgccactgcactccagcctgggcgacaggctgctccgtctcaaataaataaataaacaaacaaataaataaataaataaataaaggccaggcgcagtggctcatgcctctgatcctaccactttgagaggccaaggtgggcggatcacttgaggacaggagtttgacaccagcctggacaacatggtgaaagcccgtctctactaaaaatacaaaaattagttgggtgtggtggtgcacgcctgtaatcccagctacttgggaggctgaggcaagagaatcgcttgaatccgggaagcagagattgcagtgagccgagatggcgctgctgcactccagcctccgcgacagggcaagcctccttctcaaaaaaaaaaaaaaaaaaaaaaaaaaaaaaaaagacgagtggaaattaaccaagcaaggattagtgtccaggatggggcagagtgctgggcagaagaacacaggtagggagaagatcaaaacattttctctaccctcaggagtctcatggcttgagtggtttcgagtctggggctacatggcacagacatagaaaagataagtcccgaaggaacaattatttatttttttattttgctagacagggtctggaactcctcctggcctcaagtgatcctcctcccttagcctcctaacgtgctggaattacagtcgcgagccagcgcgcccggcctcaattttaaacgtttataaagatagagaggttgtggcagggcgcggtggctcacgcccgtaatcctagcactttgggaggccggagcaggtggattgcctgagctcaggagtttaagaccaccctgggcaatatgacaaaaccccgtctctaataaaactacaaaaaatcagcgcgcctgtagtcccagctgtttgggaggctgaggcacgagaatcgcttgaatccggaaggcggaggttgcagtcaacggagatcacgccctgcactccagtctggacgacagagcgagactgtctcaaggaaaaaaaaaagagagagagagagaaagagagagaggttggctgttcgcggtggctcacgcctgtaatcccagcactttgggaggccgaagtggaccgatcacttcagcccaggagttcgagaccagccggagcaacatggcgaggccctgtctctacaaaaaatataaaaattagccgtgtgcactggcgcacgcctatagtcccagatactccggaggctgaggtgggaggatcccttcagctggggaggaagagcttgcagtaggctatgattgcaccactgcactccagcctgggcgacagagcgagaccctgtctcaaattttttttaaaaaatagatgtttattatgcattcatccagtagatatttagtgcgtcgatctactaagcaaggggcccaggcactgggattccgcggtgaatctgagcatccccgcctcccgttcctgcctcgtgattggctgcccttgggccaatggctgaagagtccaccgctctgccagcccccgcggcaatcctccagctgcagcttcccctgttcggtttgcaggcggcgctgtgggctcactgactcctccgtcacacgcagacctggtccccaccctctctgattctttcagactcttaggaatgaatagagtgtataccccagagtcccaccctctttacaaaatccttttgtgaatttttctgcctgtgcaggtttccaatacaggtccagaatcccacgcccgcctcttatcaaccaacaccagcggctctcccgttaatgtgacctccagccattcggcccgtaggccgatgcttgggaaatcttgacagcggcccaagccggcagtcggcacttctctcggtcggttaattgtttactcgtttgtttatttatcctggagtggaggctagccgggtgcgcggaggcggctgcccccagggaagcccgcttcctgtggttggcttgctcaactactatccgccctcttgcgcactggaaaaaattgcagagctgggaatgcaccccttgatggttccgttcatgcagtaaaacaatgcctgggcccctgccttgtgcctggatccgtgctagggacatcgacgatgactgaaacagccctggccctgccctcaggggccttgcagtccgatgggaaagacctatcaccagatatggaccacccaaggtggccagggcttggacgggagacctaaagggactgtgggagcttggaaggagcagctgacccagcctgttgcatcagagaaggcctcctggaagaggggacatctgagctagcatctcaaagaaggctagaaggacaaccatgtagtctctggctaccatgtccccagtgcctaccacccccttgtttagcattggatttttttttttttttttttttttttttttgagacggagtctccttctgtcacccaggctggagtgcagtggtgcgattttggctcactgcaatctccatctcccgggttcaagcgattctcctgcttcagcctccctagtagctgggattataggcgtgcaccactatgcctggctgatttttgtacgttttgtagagacagggtttcgccacgttgtccaggctggtttcgaactcctggcctcaagcaatccacccgcctcagccttccaaagtgctgggattacaggcctgagctactgtgcctggccgactcattcacttttatttattaacaagttttaattgtgggtcattggccagactttggaactagccagggtcccctgccttcagagggctcacacataaaatggtgataccaacacagaacttcatttaatctttttagagacagggtctggccttgtggcccaggctggagtgcagtggcacaatcatagctcactgaagccttgaactcctgggcttaagtgatctttcttcctcagtctcctaaagtgctgggatccaacacagaactgcaaaccttgaaccctgaagaaatgctacgtgtagcaacgtgacccaattgtctgggtttgtgtctcaaacctgctgcttactagctgtgtaacttttctgtaccttataacttactcataaggttgttgtgaggattcagtgagttaatgggtctaaagtgcttttagactgctgcctggcatgtccaggcatggcggctcatgcctgtaaactcagcgttttgggaggctgaggcaggaggcctgcttgaggccaggagtttgagaccaccctgggcaacatagcaagactccatctctaccaaaagaaaaaaaaaattggccaagtgtcatggtgagagcatgtagttccagctgctcaggaggattgcttgagcccaggaagttgaggctgcagtgagccatgactggtccactgcactccagcctgggcaacagagcaagaccctgtctcaaaaaaaaaaaaaaaatccacacacaaaaaaaaacaaataaaaagaatgttgactagcctggccaacatagtgaaaccccgtctctattaaaaatacaaaaatttgccaggtgtggtggcacacacctgtagtcccagctactcgggaggctgaggcagaaaaatcgcttgaacctgggaggtggaggttgcagtgagccgagacctcgccattgcactccaacttggatgccagagtgagactccatctcaaaaaacaaacaaacaaacaaacaaaaaagactgttgcggccaggctcagtggctcacacctgtaatcccagcactttgggaggctgaggtgggtggatggcttgaggccaggacttcgggaccagcctggcccgaacaggtgaaaccctgtccctactaaaaatacaaaaattagccagatgtggcgcctgtagtcccagctactcaggaggctgaggcagaagaatcacttgaacccgggaggtggaggttgcagtgagccgagatcacaccactgcactccagcctgggtgacagaacaagactctgtcttgagaaaacaacaaaaacaaaaattagcggggcgcacgctggtaatcccagactctgcctcaaaataaaaaataaaaataaaaaaagactgttgcttggcacgaagtactcatttttattattaaagaacgagggatcaggccaaatctgggagactaccctgagaaggtgacttcaagctgagagttgaagggtaaatcagagctgatgggctcccaaggggtttgggggatccagagtgagcccaagcgtccttgttctccagatgctgccagctcacaaatttaagattgaaaagactcggaacactgcataggcgttgtaaagacattaatttgaaatacaggtatcaggaattcactgccccccaccttgtctttcctgtgtctcctcaagtaatctcaaaagtcccttacacatcacggtttgtaatgacagtccacgcactcgatttggcagccccgcagtgcttaaagaaaagttgttgttgtttcaagccactaacatctaaaaatcagactgaatgcattaaaagtgcctttttttttttttttttgagacggagtttccctctgctgcccaggctggagtccagtgctatctctgctcactgcaacctccgcttcccgagttcaagcgattctcctgcctcagcctcccgagtagctgggattacaggcgcccgtcacgacgcccacctcatttttgtatttttagtagagacggggtttcatgttggccaggctggtctcgaactcctgaccgcaagtgatccgcccgcctcggcctcccaaagtgctgggattacaggcatgagccaccgcgcctggccctaaaagtgctacattaaaaaaaaaaaaaaagtcaatggaaacatcctttaatataaaaatctttattaatggaataaacaagcccctgtaattttatttatcaacgcttacagagcgcttactatgtatgcaatgcatgatttcaagagctttgcaaaatataatctatttaattttcacagcagccctacgagagaggtacgattattatcccattttatagatgaagagactgatggcagaaatgccaaatgtaataggaaacagcctttcttcatgcattccacaaatattggctcggcgcccgggaagctcatcttccacgatctgtacttccggaggagtcccagaggaacacctcctcagttcagaggagtcaagggttacagcggtgccctctcccatcactactcttttcccttcaggcgccctaattgacattcgatttgtagccatttgcacaatgctaagtgacaggcttgggctgcacacaggaccaggccgtcttccctctcctggggatcagtcgttcacagaaccaaaaacaagttgcatggacgcgcgcgttggctgcagattttcttcacagccaggagaaagagcacgcgctctccagccccgcctcttcttccgggacgacgaattgcggggctcggattgggctgaggcgggccacgcctcctcatatcctccaatcaactccctctctggtgcgctccctccttctcagccccgccccaccgccccacgttacgtcgctccttctggcctcctccgttatcccggcggctgcggctcgcgcggcaaacccacctcccattgcttcccattggctggtcaggtcccgcgcgagcgggatcgcgcccttcgccccccacccccaaaaccgggccatgcctctctccttcggctttctccaggagccagcgcgaggcagtagatcggctgcttgagacgcgcgcgcagctcctgcggaccactccctccgccctgcgccagcagctgcgccggctggcagccccccgcgcacgcgcgctcgcccatcccgctccctctgctcgtttgcaagtcgcctcgcgctcagtcgcgacggcggccgccgcaatagcggcattttcgggggcgcacgcgcactgcaccgtccgcggccgttcctaacctcaggcagcggctgtggcagtaagcccctcgggtgcgcacgcgctctgacctcttcccactgcctcgctggttgtcccttcgcggcgcgcgcccaggggccgttatacccctgcaacggtccacgcgccgcgcacgcgcagtagcgagggggcgcgcgcgcgggagcggccgtcgcaggaaggaggtgccgccgctgccgccattgcgagggagggagggagggagggagtgagcgaggctggtccgccctccccctggttgccgcccctccccccttcccctccccgccccccgccccgagggagagccgcggcgcggcggcaggaggaggtggaggaggcggaggagggaacccgcgagggagggtccgcccggccccccgccgccggagccgccgccgccgcctcagccgccgctggactaggagcaggggaacatggcgccggggcccccgtcgttgctgccgggattttggaggccggggccgcgctgagggcgcccagctggtgagtgcgcgagctcacgggccccgggcggcgaggccgggcgccgccccgctgcggggtccagggggaggcggggacggcggggcccggagcccgcgaacaatggaggagctggagggggaggggaggagcggccccccccccagccccccgggccccgccgtccccgtcgcttcgcgcgtcggcccggcccgtggggccctcctgccctttggacctgcccctgcccgccccagccctgctgtccccgccgccgcccccatccccgacccgttgggatctcggtgtctgcctcggagcctacccgacttcagccaaccggttcccaattctgcgccccccttcccccttccacccctccataatgcccttcgctcctcccgggctctgcagtgctcctgggacccatcttctcctcattgaccattctgcatctcttaattgtggctcccacttttgagatccgtgacgcttctccctcttctcgattctgctctcaccacccttcagatctgtcctcggccccttctttgacctaccttctgtgctattattcctgtctcagaatctgttgcaccctgggagctgtccctttaggacctgcggttccaaccctttggagatccatctgagacccctgttcggccaggcactgctgccccaggtcttccccttggactgaatcccgttccctcgtgggccctactacccgcatttcttgtctgccctctcgcagagcctgctgcaccccgggatgcccctcggctggctttctgacccttccgtgccccagctcattcccctgatcccctcggacttggctgcaccgtgcttgcctgttccccttctcagctcttgttcccgtttaccattcagaccctttcctctcttccagacctttctgcctctcagctctgccccttgcccgacctcagatcttgctgcgctcccctcacctgcttgcttctgactctgccttcccgggaagcagcctcctcccccttctctgactctgcaggtctcccatttctgctattcacttaaatgatgtatccctaactcagactgccttcagtttcagcccgtgttctcttggaggtttcctctcttccccacctcctttttggcactcctctgagctactgcattcatttgcttctcctttctttggcctgtctctccttcagttctctgcctgaaaactgcttcctgtcccctctttgctccaattcctctcctccccgttttagcccttagacatgccctttaacctcactatacctctgatacctcccgggctggtcacccatccccttcctgttctgcatctcacagacctgcccctagatccattttgtacctacactttcttctcgtttttttcaattctgctccatcctctttatttagtgtttccctccccagctcggctccttcggagctgtccacttgcccgcatatttttagaccggtttttaacttctgtattgccgtcctttcttggagcggtcctttaacactggggttcttgtcactgtgtcccctctctgttccctcccgagtcttttaagttttccacatgacagtctcttccccccaccattttgattcagccctcacccttcactctgctttatttgcccaccctccactgttctgcctcttgtcttcttttggagttctcactccaattgtgacattacgatgtcttcttaatcattctttcctatgtattcccccccaccttcctcttggagctgcctcagtgctgtgatagattatcactcccctttgatatccctctcccaattctgttcctcttggacttgtttccttcctcaccttttttttttttttccttccccttgtatcctgccaggctccttctcttcccatttagttcctatcagacctgctcctcgcagctcaccacccgtggcccacccattccccattgagcacttcccctttcaggcatatctttctttccatccctctgctgcagaggcaaaggggctggattgggccttaggctctccaggctctgagactgcagattctctctctgcgccctaaccctgagggttctctccccagggatcctgagagatctgggtaaataggtgggggttggttgattgttactactctctggagtctgggagtgtctcccccatttcccccacttccactaggttagtagtgtggggggaggtagatctttttccattgccccattttctttcctctgctgtttgctctctcccttcctatctctgggctttgcagctttgtgtcctttggaaaaggggattgcagctgctcgcagatctttattctctttctcactttccctccttccttctctgagccattgcatagagtaccctctctccccttccacctctaagccagcaaccctaggagtgtccttcccttcccccccgccttcgcccctcccccccagctaacaagttatttcaatatatagttttacctctagctggggaaatgccagttctcaaattatcccgatcccaccaggggttatggccacagttggacctagggaagctacagtattgccttccctaatggcctctggtttgcagtgtgaccttgtgggaggggatggggaaggtgggcttatttctttttcatctttgccccgggaaaggctccagcttcctggtcttcaaaatggtgagggcttgggtttggaaagcactttgcggttgtttgttgaaagagagagtgccaaatgtcactcagatttctgccctctggtattgcaggcactccctgccacaggagctgagtgcctctgggcagatccatgctagattctggggctctttgcctgccgtacaaggggtgtgtgggtgggccctgacattccttaagctttttgagtgacctgattgggtagagttagaaaggggtgccaggaactggcggatgtgattggatttttagtcttattatctgagaaatgcgtcttggctaccattcctgagcgattttctttaatgactctatggttgtgggggggtatttagttcattcaggggtagaggtggtttttacagaaaatctgtccaaccattttccttccttaacttgggaaaggggatcttttgcatgttctaggtttatttattttatttcttaagtaaatcaaaagcctgatttttttccctgctgtggcctagggcaattgtatattaaagtagccatccaactgtgaaggagcatttactggaaggactttcttaactgtgctatgatcaaactttgtttattttagtacttatttagaaataattctgtgtggacacatttgaaataaaaacattcactgtcatctacagagttggaccattcactcatcaaatattagggcatttgtatatgagacagtgaagagggctgatagtagatttgtatggtcccttgaactttttaaaattttctgacagaatctggtaattttaataatctatgtatggcatgggttttcaccattattgacttaaagatttttggttcatttccgttggtaaatttttagccttgtgtgtcatgattaattttctgaatttatcttagagtttgtgttacccatgttggtgtcaatagttgttttgttttttattaatatggaagtgacagataattaagaataaaaacaactgtgtatgcagtactgcttaaatgtgtgtcccagagttttaatatcattggcagcatgaaaagttcctgcatgccaaaagcctaagtttacataatagggagagaggacacacagaatagagagctgatttttccaccttaactggtaaccgatgttcttaaagactgtcagatttctctgaggctagcagaggccctaactccagcattgccatttgctttcatgatgggattgggtgctacagaaatgtgaggtggtagccttggccttctggcacagttaatatgccatttggagtggggggactggagcaggagatggcggtagacaactgctttcaaggtagtaacatgttttcaagggctcttgccctgcctagaaaatctttgtaaagacttaaaaactaatctgatcaaagttcctcatttaagttatcatcttgttttcaactaacctctttttggccatgctccccacccgcccttttacctgcccgccattttccttggcatgatgaaggtcgatgcatttagaacagtgacaaatcagaaaatactcattcttattgatccagaagagaagaagttgaaagaagttgtcggtgtgcagattcatgggcagatccatggacctgatggtgacttttggcaaaggacacagcctgggaagggtgggggttgcacaggtgacagtaaaccatagcctaatagatgtttggtgagtctgcatgtgaggaggtgaggcgtcaggtcaatatagttggagattgaaaaggtcggagtggttgttcgtctccatctagtctggtctgcttcccaactttggtccactgtggtctcctgagaggtgttaggccgcttgcagcgtcttcctgtgatctgctgtgacttttgtcggtcaccacctggcagtctaaacaatgtcttgatttacacagtaatcgtgactttttttgagatggagtttccctcctgttgcccaggctggagtgcaatggcgcaatctcagctcaccacaacctctgcctcctgggttcaagcgattcttctgtgtcagcctcccgagtagctgggattacaggcatgcaccaccacgccaggttaatttttgtatttttagtagagatggggtttcaccatgttggccaggctggtcttgaactcctgacctcaagtgatccacctgcctcggcctcccaaaatgcagagattacaggcacgagctactgcgcctggcctgtttttcccttttttaaaaaatcttttgttattcatcacagcactatccatgatgtccagttggtaagatttctttttcacgatctgtaaaataggtaaaattgagattctttgcatgaagagagaaggtgactagcacaaatacctcctttgacgccttgcgttcattggaactcagtgggaaaatcagcgcgtagtctagcctcctcatttacagatggaggaatggaaggctggcatagggcattgtgacaggcttcctgccacagcagaaaagtactggatttatataagggcagtgacctggcttctgatctaggccttgtcctaattagctgggaccttgaacaaattgcttgacctctctgggcttcaccttcctagtctgaagcctggagtgctgtccaggtctgattgtagattcttgttgtcctgggtcacttaccaagttagagttggagcttaggactaagctcctgttgctactctttgattcctctctcacctgccaatccccaactgcctgtcatcaagtcccgtaacccagagtctgtgtagggggctctttccctgggagatgcagtaaaatgaactggattacctttgttgtatactttttcagatataaaataaacactgcctgtttttcaaccattcacatggagattactttataatttagggggatggggttatccagattatattagctacataactaaaaccatatacctcttttaaaaacgatatggaatttttcaagctgagtcattgttgacctaggctctcaaacagcaatggtctgaacagcacttgtattgctggcattaagaaatgcaaacaaataattcgtgttcatcttcccaaaacttttgatccagtgctttatcaggcttcatctataaagaattcttgaagataacttttggcatctgtcaatctaattttcatttatttgcttctctgatactgagaaatgccattaagttgatatattagcagagaaccagatactttcagccatgaagtatcattacaggaaagtaatatttattttagttgaaaatagccagacttgcctatctctctcatcttcctttattgaaacgaacattttctttttatgtactttgcagcagttgtgactgttgtattatagatctgcaggtatttcctgcctcttttgctctcctgatatctctgcattcttacttggatgatgccctcgtcctggccactgtagtaaactggtaattgcatttggacaattgagaggcggcttcctatgatgtaaagaacattgaagaaacctgggtcctagccctagccctgtcatttactagctttgtgactagccaaatcattttcatttctctggactacagttccttcatttgaaaaatgaagggattatactagttggttcccattctgccttattttgtggctaataatacttgattgtcatctctctctctagatagacagtaaactcctgaggatgaggagcctcttatattatctttgatttcctatcacacctagcaaaaataccttgtacttggtaggcccccattgtgtccatgttgacagaagataaacaggtgctaaagttttttgttgttgttgttgttgttttttttttggagatgtttgtaccaactgtaatggccatttgcaggctttaaatgcttagagggcatgctctcctggtcagcctttttttaaattttttctttttttgagacagagtctcgctctatcgcccaggctggagtgcagtggcgagatctcagctcactacaaagtccgcctcctggattccagcgattcttgtgcctcagcctcccaagtagctgggattacaggcgcacgcccaccatgcccatctagtttttatatttttagtagagacggggttttgccatgttggccagcctggtctcgaactcctgacctcaggtgatccacctgcctcagcctcccaaagtgctgggattacaggtgtgagctaccgcgcctggctctggcccagtatactttaatctgcatacttgctgcattgtaaatttcttgatcatgatgacacagttaataagtagtaagtcagtgtgaagaatccagatctgtctgatttcaaaatttgtttattttattaggctacactgcctctctgggtataagaataagcatagttcatcaccttaaggaatttatggtcaattgtaaacaattaactatatagggtgaagggaagtaaatgttgaatagactattctgattaatgtctggctccttgggatgtgatcctgtattaatagtcttgaagactttcatattcagagatttgagcacacagtaggttccatatcacagtattttgaaaagaatgtacaccacaagtaccagcttgcctttttagccagcatatttggaaaagttgagcattttatgtctgacctgaattcaaacacaggtgtaacaaaactgtgtaagtaaactagtctaacaggaagaaggtagagatgtttggtcatgtaatgactccttaaatctacatttttttcagcaagtagaaaagtatttgggtagctacaaatggagagatttttctttaggcaactaaaaatatatacatagaatatatacaactacaatttgccaatttacaattaaaaaataaaaattaaaagaaacatacagatagaaatacatctttcctcttgagttatttaggtggagctcaccgtgatttttttttttttttttttttttttttttggtgacgtagtcttgctctgtcactcaggctggagcacagtggtaccatctcagctcactacaaccttcaccttccaggttcaagcgattctcctgcttcagcctccgaagtagctgggattacaggcacttgccaccacgcctggctagtttttttgtatttttagcagagtcgggtttcaccatgttggccaggctggtcttgaactcctgacctcatgtgatccacctgccttggcctcccagagtgctgggattacaggcctgagactccacatctggacatgatactttatttagtaactttttgcattttaaaaaaatgttagtctaaaagtatgctggttagttacagctaatagcctcctgaggtgtatatatatagttggccaggcgtggtggctcacgcctgtaatcccagcactttggaaggccaaggtgggcagatcacctaaacgcctaacccccagaggtaaaggctgcagtgagccatgatcgcatcactgcagtcctgcctgggtgatggagtgagaccttgtctcaagaaaaaaaattgtgtgtgtgtgtgtgtgtgtgtgtgtgtgtgtatttgcattgtgtgtgtgtatgtatatagttgcattgtgcttttcccccattttcatttaaaagaaaggtcaaaactgtggctttatctcttgcagcctgcactacttaggaatgagacaaaggaaaatgattaccattaattgccatgggcaattaaaaagagttctttgttcagtaacaaattgattgtgtacaaatgaaagtcagcactgcattaatacaagattattagattcttgaaatcagcatcttctgctagagtagctttcacttcaagggaattatttcactgggaatagcgtacctaaatgattggtgataaaatgtatcactaggtctttatttttcagaaatgcctgttaacgttgtaggtagaggctggtggatgctgcttttatggtaacctttttaatgtcctgaaatcactgtgtactttttttttttttttttttttgaaacagagtcttgctttgtcgcccaggctggagtgcagtggcgccatctcgactcactgcaagctccgccttctgggttcacgccattctcctgcctcagccacccaagtagctgggactacaggcgcccgccaccatgcctggctaatattttgtattttatttagtagagacggggtttcactgtgttagccaggctggtctcgaactcctgactttgtgatccgcccacctctgcctcccaaagtgctgggattacaggcgtgagctaccacgcccggcttgtatactttttttaatgctgtcaatgtataagaaatttcttcttctgggctgggcacggtggctcatgcctgtaatccccagcactttgggaggccgaggcgggtggatcacgaggtcaggagatcgagaccaccgtggctaatacggtgaaatcccatctctactaaaaatacaaaaaattagccgggtgtggtggcgggcgcctgtagtcccagctactcaggaggctgaggtaggagaatggcgtgaacccaggaggcggagcttgcagtgagccgaggtcgtgccactgcactccagcctgggtgacagagcaagactcagtctcaaagaaaaaaaaaaaatttcttcctctgattggtcagtcaactgaggaacgtagataaaacctttgataaatgaggaagaagagaaaaagactcctgactgctgtggagtaggtcttggctgttggcatgtacctagtagtagccacgcaacaaccataaaggcttaaaaaatggcagccttagctaaagtagttgtgatttgatgttatgtatatacaaggtgtatatattttcttgtgtgcaaatccccttttaagttttttcttaaaaaaaaataaggtataatctacatgtagaaaagtacgtaaatcttaagtgtccatttctgaattttttgcatgttgtacaagcccctttttcatatgatggggcataattcccttttctacatagttcttactgagccggaaattatttgagagtctctatataaggcacttcaattattactttatatttaatatacaaatgtgaacatgtaggatgtttctaactttacccatctgggcagggtcaaatacctgataaagaatgggataacggtgatttcattgtataaactgtcacaagtgtgaaagcattcttttaacaacatcttttctactcgtgttgttaattccagattattttgatctttgtttgctggaaattaaaagaaaagagatagtggtcactgctaatgagagtgaaatgggactggtattgaaattgctatcaggcctgcaaacaagtgtgaactttcaggaaagtagtttagcaatgttttatttgtttgttttttgagatggagtcttgctctgtcacccaggctagagtgcagtggcatggtcttggctcactgcgacctccacctcccaggttaaagcagttctcctgcctcagcctccccagtagctgagattacaggtgcgtgccaccacgcctggctaatttttgtacttttagtagagatggggtttcgccatgttggccaggctggtcttgaactcctgacctcatgtgatccacctgcctcagcctcccaaagtgctgggattacaggcgtgagccaccatgcccgtccagcaatgttttaagaaacgtacaatccttgatctacttataagaatctatagagggctgggtgcagtggctcatgcctgtaatcccagcacctggggaggcctaggcaggcggatcacttgaggtcgggagttcgagaccagcttggccaacatggtgaaaccctgtctctactaaaaacacaaaaaattagccaggcatggtggcgggtgcctgtaatcccagctactcgggaggctgaggcaggagaatcgcatgaacccagaagacagaggttgcagtgagcggagattatgccactgcactccagcatgggtgacagagtgagactctttgtctcacacacacaaaacaaagaatatatagggaccaagaaagagagatgtgaatcaagattgtatacaaaagagatgttaactatgttaactatatgaatgtttataaatttaaaaaaaaatctaaatgttttaaccttaggggaatggtttgctttgtggaaaggttatggagtcattaaaaaagtatgtttttgagaatacttgacgtgggaaagtgcacacaaaataaaattaaatgtgggaaaaaataggatatagaactataaacagcatgagtccagttattttaaaatatatatgtgaaaaagtggaagaaatatgctgaagtgttattagttaactctgtgttgtaggattatgggtgattaaaactttttttttaattttcccaagctttccacaatgattttactatttctgattcagggaaaaaaagattaaacaagttttttttttttttgtagtgtggttgtgttgtgtttggtttttcttataaacatatgaaagaaaaattgagctgaaaagcaagaaattcatggtaagatctgttggactctagtacctttgaaggtaaggcattcaccctttcttagagaataatcaaattaattactaataaggctgggtgaggtggctcaagcctgtaatcccagcactttgggaggccgaggcgggcggatcacaaggtcaggagatcgagaccgtcctggctaacacggtgaaactccgtctctactaaaaatacaaaaaaattagccgggcatggtggcaggcgcctgtagtcccagctactcaggaggctgaggcaggagaatggcgtgaacccgggagacggagcttgcagtgagccgagattgtgccactacactccggcctgggcgacagagcaagactccgtctcaaaaaaaaaaaaaaattaattactaataatattaccaaataataacaatgaactgtttattacataccagaagactaaaaaatgttatctcattttctcctcacaataaccctctggggtaggtggtattcttaccttctaggtgggaaaccgaggttgcagagaggggacttgcccaaggccacatggctagtaggtccccaaagcagtctggcccagagtctctgctctctgttgacttctctggccgactttacagtttccagagtgcttttttaacacactttccagaaagtctggaaaggactttacactttccagaatgctttcgcccagtgtgatctcagcccagagatgaagagaattcaagtctactccatggtggatagatagagctgaacccttagttctctttgaacaaggttcccttctaacccctaaagtgtgcttgttttaagagaaaggagccggctgggcatggtggctcacacttgtaatcctagcactttggtgggccgaggtgggcggataatttgaggtcaggagttcgaaactaccctagccaacattggtgaaaccccatctctactaaaaatacaaaaaaaaaattagcccaggcttggtggcgggcacctgtaatcctgctacttgggaggctgcggcaggagaattgctagaacccaggaggtggaggttgcagtgagctgagatcgcgccactgcaccccacctggctgacagagcgagactctttctcaaaaaaaaaaaaaagccgtcggtcaaagtcaggaatggctataaaattagtgatgtgttcccttttatgggccaaaaacatcattttaatgagatttaaatttatttaagctttttttttttcttttttgagacggagttttgcccttgttgcccaggctggcgtgcagtggcacgatctcggctcactgcaacttccgcctccggggtacacgccattctctggcctcagcctcccaagtagctgggattacaggcatgcgccaccaccctgggctaattttgtatttttagtagagacggggtttccccatgttagtgaggctggtctcaaactcctgacctcaggtgatctgcccgcttcagcctcccaaatgctgggattacaggcgtgagccacctcgcctggctaagctattaattaaattttttttcccaaagtcctgttttgaagtcctgtctataattaattttatttaaataatttagcaaaagtttgttaagcagaagagggaacaaactagttctttgtagttccagaggatagaggtagaggtctaggtatctacaaggtttagagtgcacaaaacatgcctcttcctctctgggagaatttttatgccgtttataaaacaaaagcaattcttcccttacaggtaacacaaggaacacactgtttctttaccagaatgtaaaaaatttagaaggccagtggcctgattgtttttacttgatcttatcttaaagaattatgtgtgactaagcatttcaatgcaagaatgcattgactaggaagacagatttcgtcttattatgagaaagaacttttaaagaaaacgatccaagctcatgttttatgttttgtcttttttttttttttttttttgagtcggagtcttgctctgttgcccaggctggagtacaatggcacaatcttcggctcacagcaacctccgcctcctgcgttcaagcgattctcctgcctcagcctcctgagtagctgggattacaggcgcctgctaccatgcctggctaatttttgtatttttgatagagacggagtttcaccttattggtcaggctggtctcgaactcctgacctcgtggtccagccgcgttggcctcccaaagcgctaggatacaggtgtgagccactgcgcccggcagttttgtcctttttttttttttttttttgagacggagtcttgctcttttgcccaggctggagtgcaatggctcagtctcagctcactgcaacctccgcttcccgggttcaagcggttctcctgcctcagcctcctgagtagctgggattacaggcgcccaccaccacacccggctaatgtttgtatttttagtagagacggggtttcaccatgttggtcaggctggtctcgaactcctgaccttgtgatctgcccgcctcggccttccaagaagtgcagggattacaggtgtgagccaccgcacctggccccattttgtgttggataagcaataattttaaagtttaccccatttggttttattgttgtttttatttaacaagacgtctacacatatatctattaaatatttatttactgatcattctttctgttgtcggggagagtaacagatcttcagttcaaggaggttggcgttcagacatcaggaagaaattgcaaaataaagtgttttggatcctctgtgagatttttgtcttttgttcctccatttgttctgtgacatcacctagaacatgacctgacaggtcagtaggagctcagtcttcattgaataaaagtatgagtttctgaatgagagaatcctggaatagatgaagtctgtcgcctttcagtcttcagattcttgggattcctcaagccatgtagaggaaagaaactttcctattgttagttttcatttgcatcttaccaactttgtgacttaggacaagtcatttattcttaatctgagttctcgtgtctataaaatgggcttaaatacctattttgcttgccacagtctttttatttttattttttgagaactaaataccataacgctaaagttggtaacctttgagtttgctggaagaatgaaagagaacaattaggtaattaaaatgttcaggtaagcgagcatgtgagggtgctgcaaaggcggcgtgatgaaattttggatcagtggagtggcacatgctattgatttgttatctcttggtctttgtacaacttgtaatttgcccccaggtagcagatagtttgaaggtcttatcagaaagtgtctcatacacctaaatgttaacaccaggtcataggccaaatagcagttgtccacatttgtggaggcctccgttactctttttctcatcatgacacatggcctaggtttgagtcccagtcccacctcttacctgctctgcaccctccgacaaggccctttaaactcttggtgccttaggcacgtcgtcttaaaaaggagaatatagtagtgtttactcatagggtaactgtgctagttaatatgcttactgtgtgtcattattagtgctgcactacctggacctggctttattttttttttttaatttaattttttttttgagacaggatctcacccacgttccatggagtacagtggcatgatcacaccttactgcagccttacctcacaggctcaatcatcttgcttcagcctctgagtagctgggaccacaggtgtatgcatgccaccaagcccagctaattttttttaaattttttttttcttttaagatggagtctcactctgttgcccaggctggagtatagtggtacaatctcggctcactgcagcctctgtctcccagttcaagcgattctcctgcctcagcctcccaagtagctgggactacaggcacccaccaccacgcccggctaatttttgtatttttagtagagacggggtttcaccatattggccaggctggtctcgaactcctgacctcatgattcacctgcctcggcctcccaaagtgctgggattacaggcgtgagccaccatgcccagcctaaatgtttttatttttcatagagacggggactcgctgtgttgcccaggctggtcttgaactctagactcaagcctcccttttcagcctcccaaagtgctgggattacaggtgtgagcacgtggctggacttggctttaagagaccagctaaagaatatagtggtaggaaaataaatacaggcataactcagagatagtgtgggattagttccagactactgcaataaagcatatatggcaataaagccagtcacacgaagtttttcgtttcccagtgcatataaaagttaagttttggccgggcgcagtggctcatgcctgtaatcccagcactttgggaggccgaggcgggtggatcacctcaggtcaggagttcgagaccagcctaaccaacatggagaaaccccatctctactaaaaatacaaaattagtcaggcgtggtggcgcatgcctgtaatcccagctactcaggaggctgaggcaggagaatcgcttgatgaaaccaagaggcggatgttgcagtgagctgagatcacgccattgcgctccagcctgggtagcgagtaaaactgtctcaaaaaaaaaaaaaaaaaaaaaagttatgttttggctgggcgcagtgggtcatgcctgtaatcccagcactttgggaggcggaggtgggtggatcacctaaggtcaggagttcgagaccagcctggccaaagtggtgaaaccctgtctctactaaaaatacaaaaactagccgggcgtggtggtgggcacctgtaatccccagctactcagaaggctgagtcaggagaatcacttgaacctgggaggtggaggttgcagtgagccatgatcacaccattgcactccagcctgagcaaaaagagcaagactcttgtctcaaaaaataacaataaataaaaattaaaaaataaaagttatctttatgccgtactgtagtctaagtgtgcagtatcattatgtctttaaaaaagtatataccttaatttaaaagtacctttttaaaaatttaaatattttattaattttttttttggaggggggacagtttcgctcttgttggccaggctggagttcagtagtgccatctcagctcactgcaacctctgcctcccgggtccaggcaatcctcctgcctcagcctcccaagtagctgggattacaggcgcctgccaccgcgcctggctaattttttgaatttttagtagagacggggtttcatcatgttggccaagctggtctcgaactcctgacctcaggtgatccacctgcctcggcctcccaaagtactggaattacaggcattagccaccgctcccggcctaaattttttcattttttaagtttatttttttgagacagagtcttcctttgttgcccaggctagagagtatagtggtgcaatcttggctcactgcaccttccacctcccagatttaagcgagtctctctcagcatcctgagcagctggaactacagatgcgcaccaccacacctggctaaatgttttgtatttttagtaaaaacgggatttctccacattgaccaggctggtctcaaactcctgacctcaagtgatccacccacctcggctttctaaagtgctgggattacaggtatgagccatcgcgcttggcctaatttttatttttttgagagagactctcactctgtcacccaggctggggtgcggtggtgcagtctcagctcactgcaacgtctctcgggttcaagcaattcttgtgcctcaacctctggagtagctgggtctagagatgcgcacactaccacgcttggctaatttttgtatttttcatagagatggggtttcgccatgttggccagggtggtctcaaactcttagcctcaagtgatttgcccacctcggcctccggaagtgctgggtttataggccggagccactgtgtccagctcccacaacttcctttgtttttgttgttgttgttgttgttttttgagatgtctcattctgttgaccagcctggagtgcagtggtgtggtcacagctcactgcaacctcaacctcctgggctcaagtgattctctggactcagcctcctgtaaaaatactttattacttaaaaaatgctggtgatcatctgagcctttggtgaatcataacctttttgctagtggagggtcctgccttgatgctgatggcttctgactcatggtggtggttactgaaggttgggctggctgcagcagtttgttaaaataaggcagcagtgaagtttgctacattcattgattcttcctttcgtgaaagatttctgtatagcatgcaatgctgtttgatagcattttatccaccgtagaacttctttcaaaattagagtcaatcctctgaaaccctgctgctactttatcagctaagctatgtaatactctgaatcctttgttgtcatttctgcagtgttcacagcatcctcaccaggagtagattccatcttaaaaaattgctgggcgggccaggcacggtggcttaacgccagtaatcccagctcttcggaaggccgaggtgacctcatctgaggtcaggagttggagaccagcctggccaacatggagaaaccgtgtctctactaaaaatacaaaaatggccaggtgcagtggctcacacctataatcccagcacttagggaggccaaggcaggcagatcacgagttcaggagatagagaccatcccggctaacatggtgaaaccccgtctctactaaaaatacaaaaattagctgagcgtggtgacacatgcctgtaatcccaggtactcaggaggctgaggtagaagaatcgattgaacccgggaggaagaggttgcagtgagccaagatcgcgccactgcactccagccaggacaacagagtgagactccatctcaaaataaataaataaataaataaataaataaaaataaaaatacaaaaattagccacgcatggtggtgagcaactgtagtcccagctactcaggagggtgaggcaggagaatcgcttgaacccgggaggctgaggttacagtgagctgagattgcagcattgcactccagcctgggtggcagaactagactcttgtctcaaaaaaaaaaaaaaaaaatcgctgggtgcagtggccaacccctgtgaccccagcactttgagaggccaaggtggacggatcacttgaggccagaagttagggaccagcctggccaacatggtaaaaccccatatctactaagaatacacaaattagccaggcatggtggtatatgcctgtaatcccagaaacttgggaggttgaggcatgagaattgcttgaaacctggaggcggaggttgcagtgagctgagactgtgccactgcactccagcctgggtgatgaggcaagacaatgtctcaaaaaataaataaataaataaataaataaataaatcactttctttgctcaccaataagcaattcctggctgggcgtgtggctcacgcctgtaatcccaacacttcgggaggctgaggcgggtgagtcacctgaggtcaggagttcgacaccagcctggccaacatggagaaaccccctctctactaaaaatacaaaatttgccgagcatggtggtgcatgcctgtaatcccagctactcgggaggctgaggcaggagaatcgcttgaacccaggaggcggaagttgcagtgagctgagatggaaccattgtactccagcctgggcaacgagtgaaactccgtctcaaaaaaaaagaagcaattcctcatctgttcaggttttattatgagattgcaacaattctgtcacatcttcaaactccatttctaattgtagttcactttccaccacatctgtggtgactttattcaatgaagtcttgaacttctcaaagcagtctgtgagggttagaatcaacttcttccaaattcctgttaatgttgatattgtgagctctctcatgaatcatgaatcttctttttattttattttatttttattttttttaagagatgaggtcttgctctgtcacccaggctggaatgcagtagtgtgatcatagctactgcaactttgaactcctgggctcaagggatcctcctgcctcagcctaccgagtacctgagactacaggcacatgctgccatgctggactaatttttgtttttttttaagagatggagtcttactacattgcctgggttggtgttgaactcctggcctgaagggatcctcctgcctcagcctctcaaatgaatgttctttttttttttttttttttgagatggagtctctgtcactcaggctggagtgcaatggcgcgatctcagctcaccacaatctccgcctcctgggttcaagcaattctccggcctcagcctcccgagtagctgggattacaggcgcatgccaccacacccagctaatttttgtttttcgagtagagatggggtttcaccatgttggccaggctggtcttgaactcctgatgtaatccacccacctcggcctcccaaagtgcagggattataggcgtgagccactgcgtccagctcaagtgaatgttcttaatgggatcatgggatctagaatggtgaatccttttcagaaggtggactttgcccagatccatcaaaggaatcactatttatggcagtgttgccttatgaaatgtgtttcttaggtaataacacttgaaagtctgaattactcctggatacatggactgcagaatggatgttgtgttagcaggcatgaaaacaacattaatcttgtacatctccatcagagcttttggatgactaggtgccttgtcaatgagcagtaatattttgagaagaatctttttttgcaagcagtaggtctcaatggtgggcttaaaaatattcagtaaactatgctgtaaacagatgtgctgtcatccaagctttgttccatttatagagcacaggtagaatacagttagcatgattcctaaggcctgtaggattttcagaatagtaaataagcattggcttcaatttaaaaagttactagctgcatttgtctctaacaagggtcagcctgtcctgtggagctttgaagccagccattgacttctctctagctatagaagtcctagatggcatctttttccaacataaggctgttttgtctatagtagccaccttcatcaaggtgggctaggtcttctagatgacttgctgcagcttctccgtcagcacttgctgcttgcttcatcttgcacatttatgttatggaggtggctactttccttaaaccttgttaaccagtctctgccagcttctaacttttctctgtagcttcctcgcctctctcagccctgttgaattgaagagagttagggtcttgctctggattaggttttggtttaagggaatattgtggctggtttgatcttctgtctagaccactcaaacttctttctttccctttttttttttttgagacaaggtttcgctctgtcacccagcatggaatgcagtggcatgattatggcttactgtagcctcagcctcccaacctcaagcagtccccccacctcaacccccccaggttgctgggattgcaggcatatgccaccatccctggctaatttttattttattttttgtagagacaggatcagcgtatgttgaccatgctggtctcgaattcctggcctcaagcagttgtcccgccttggcctcccaaagcactaggtttacaggcatgagccactacaccctgccaaaactttctctatatcagcaataggctgtttcactttattttatttatttatttttacattttactttaagttctgggatacatgtgcagaacgtgcagatttgttatataggtatacatgtgccattgatggtttgctgcacctatcgacctgtcatctaggttttaagccccacatgcattaggtatttgtcctaatgctctccctttccttgctccccacctcctgacaggcccctttgtgtgatgttcccctccctgtgtccatatgttctcattgttcaactcccacttttgagtgagaacatgcagtgtttggttttctgttcctgtgttagtttgctgagaatgatggcttccagcttcatccatgtccctgcaaaggacatgaactcactcttttttatggctgcaggctgtttcactttatcactcgtgttcactggagtagcacttttaatttctttcaagaacttttccttcgctttaacaatgtggctgtttggcacaagaggcccagctttcagcccctcttggcttttgacatgctttcttcactaggcttaatcatttttagcttttgattgaaagcgagggacatgtgactcctcctttcacttgagcacttagaggccattgtgggattattaattggcctaatttcttttttttttgaaacagagtctcgctctgttgcccaggttggagtgtagtggcacgatctcggctcactgcaacctccgcctccgaggttcaagcgatcctcctgccttagccccactagtagctgggattacaggcacgtgccaccatgcctggctaatttttttttttttttgttagtagagacagggtttcgccatgttggccaggctcgtctcgaactcttgacctcaggtgatccgcccgccttcagcctctcaaagtgctgggattacaggcgtgagccactgtgcccggccaattggcctaatttcaacatggttgtgtctcagagaacagggacagagatgaggagcagttagaacacatacaacattttttcaactcgccgtcttatattggtgcagtttatggtgccccaaatcaattgcaatattaacagcaaacatcactactcacagatgaccataatagaataataatggaaaagtttgaaatattgcaagaattaccaaaatgtgacatcaagacatgaagtgagcatatgctgttggaaaaatgatgctgatagacttgctcaagacagggttgccaatgaccttcagttaaaaaaacacatgcacacatagtatctgaagcgcagtaaaaggaatggcaataaaacgtatgctggtcaggtgcggtggctcactcctgtaatcctaacactttgagaggccagggtgggcagattgcctgagctcaggagtttgagaccagcctgggcaatgtggtgaaaccccatctctactaaaatacaaaaaattagccaggcatggtggcgcatacctgtaatcctacctactcgggaggctgaggcgggagaatctcttgaatctgggaggcgcaggttgcagtgagccgagattgcgccagtgcactccaacctgggtgacagagcaagactccatctcaaaaaaacatagtatgcctatacgagtttactagtttttagctttgtcaaggagagaatttaaaaaagaaaaattattcccaccattatttcataaaaagtaggatctaggctggccatggtggctcacatctgtaatcccaacacttttggaagcgaaggcaggaggattacttgagcccaggagttggaggctacagtaagcaatgattgtgccaactacactccagcctgggcaacaaaaacaacaacaacaaaaaggatctaacttcagaataaaggatatcccttcccaaggaaactagctgccttatagggacatatgtaggtatatacttataattctcattttaaacataaactgaggaaaactgccacaggccagctgtttaactttttggggccttagttttctcatctataaaataatgatgatatcctttttttttttttttttttttttccccttttgagatagggtctcttgtccagactggagcgcagtggcatgctcacagctcactgcagcctcgacttcctgggctcagatgatccatctcagtgtccctaatagctaggactacaggcatgtgccaccatgttgtattttttttgtagagatggagttttgccatgttgccccagctggtcttgaactcctgggctcaagcaattcccccgcgtaggcctcccaaagtactaagattacaggtttaagggctagagtgcagtggcatgatcatggcttgctacagcctcgactttctgggctcaaatgatcctcctgcctcagctgagactacaggtgcgcacccaccatgcctggctactttttaaaatttttagtagacatgagatcttgctatgttgcccaggctggtctcaaacccctggcctcaagtgatcttcctgccttgacctcccaacgtgttgggattataggcttgagccactgtgcctggcccaggggtctatatctaaatcctaaagcttgcggaagttctttcagctgtccccatggctttgggcattatgaataataatccataggacataattggaaggtgtttcagcttaggatggattggacttttgaaaagcgccccttcttatagtcaacacaacatctcattcccctgtgaactcacccttagggaaatcattttacttttggacaagtgagaccagatcctcagagatagtttgtgactcttgcaataataatagcaaatatttccttaatcttttctatatgccaggcactgtattatgtactttacatgtattaactcaaggaatccacataacaacccaatgaagtaggtactatccttgtacccattactcagaataggaaacaggccatgcatgctaggtgatgtaagctaaggattcagaggaaggagaataataaattacccccacttagaaagtactggtctgggtttgtgtgctctctcttctgcccacctccctcctctctctctggccctacttgtttttattaatgtggggttaatgccggtgatttcatatactaaccttgatcattgggaaatgtttctctcacgggaaggtatttggatgggcatagtacattctttggtttgtcttcttgatctctagtttagcttacttgttaaagatttccagaatgatctagcagttaattccagttccattttcccctccacctttttatttttagtgaggtcctaattggatttttttaatcttaatttttttaatttttacctttttagagatgagttctcactatgttgcccaggctggactcgaattcccaggctcaagcaatcctcccgcctcaggctcctgagtagctggggctacaagtgtgtgccactgcacccagctataaatagatttttataatgtgatttttaaattttagggtattaagcttatcttaaagtacaatcaaagcctgtcacccatttcatttctctaatgcctccttgaagtattttgcttttgacttcggggaagagccttggagattgggtactgcatgatgctgcagggaggccagtggtttatgttgtcgtcgtccgtcctggagtgcttgccttaatgctgctcatttcaaatgcctcctctctgtttccaaggttgaattagcatcaggtcttcttttacatcagccttgtctaatataactttctgtgttattcattatggtaaccaccagtcacgtgttgctacttgaaatgtagctagtggggctgagaaactaaatttaaaatttttattattattagtttaactttaaatggccaaagtagtgcagatctagactatgctccgtaagggaggttttttttttcttttctttttttcctacttctaattctgacatagggctgtgctctttatgtatttgttaaatgctttcactagctgaaatacaaggaaagttaaagtattccttaaagtcttcctcccagggaaaaccgttgttaatagttgtattttttaactgtaggataaattgccagtttttattatcattacagtgattcacccttgattctagggatcgggcgttactcaaggttgttgtagatttgggagttttaggagatggaggaggcttagaatgcaggttataaatgtaacagaaagaagtatgactaatactggtaaaagtgtctttataatgattgttgcgatatgattgaatttctatcctaatgcttaagaatccttagtgaaaatgtgggaaagaggatgaatcactgttttctcccttcccaaatcccagatgattttgctagaattttaaggatggattgagtgttcaggtgattttgtcttgacttcttgggttggttgggatctttaaagagagagagattaaaaaggatttactactagcaaaactgaaaaagcagaaacatgtctgcttgaattttgagtttcttttctctttgatagtggaagcagcatcttaggccaggttcattttgtaactggtgtgggtgtatgtatgcatgtgtacatccgtctcatgtttgttaaattttcttgactccctaacagttgtttgtactccacatcatcagttttggtaccttctactcgttactgaaaggatatatttaccttctcagtgggttggtgaagatggggggtgggggagcatatatggaaactgatgaaaatgataaaaccgtggtgctccaaagtaaagaaaggaatttttaaaagcctttgaattaactggaatgtgggatcttggattggatcctggtacagaaaaggcaataaatagaaaaactggtaaaatctgaaagtctgtagtttagttttttgtgctaatttcttagttttgacaaatacaccatggttatgtgaacattaggggaagctgggtgaagggtatgtgaggactctgtaacatctgcagcttttttgtatatctaaaattattccagagtaagaaattgaaatagaagctgtgactagcaagagcttccaagggctgtgacttcaccaagggagtgtgttcataagtagggcttctctctaagggcctctagaagttctgcttatctgcccacttccctccttcaactcagtgctctaaccatgtggaatgactaactctccccaaaatccatgcttctgggccgtttcatacacttctcatcggggtattctcctgctacaccctccccgaccgaaccaaaaacaaaatacataaagatcacctaaaaaacaaaaaatgcagcttgactaattccttttcattctttaggtctctggcttagattttatttttttcaggaagccttccctgacccacagaagtcagtgtcttgtctgagtttgcctgctgagtggaaccctcattgtgctggtacttagtactttgccttttttttttttttctgagacggagtcttgctctgttgcccaggctggagtgcagtggcacgatctcggcttactgcaagctccgcctcctgggttcatgccattctcctgcctcagcctcctgagtagctgggactacaggcgcccgccaccacgcctggctaatttttttgtatttttagtagagacggggtttcaccatgttagccaggatggtctcgatctcctgaccttgtgatccgcccacctcggcctcccaaagtgctggggttacaggcgtaagccaccgcacccggcctcaatcaataatatatatatatatatatatatatatatatatatatatatatatatatatatatataaaatattgattttatacacacacacacacacacacacacacacacaccccacaacaagaagtaaggctcctgctcacaccttcttaggctccactggcagcagcttccctcatgcccttgggtaacggtggctgtggtttgctctgtaccagcatatatgctgtagatggccaaatccctgccagggagacaaactcagcaccataaaggtgagaaagcacattttgtaaggcttattcttatatttcaaggtcccaggggtccaatttaggaaaatgttttgttttttaaaatctgcttagttatgtagcattatcttttcctgtactatgtgaatttacagctcattttaccataaaagataatgtgtaggttgtttaaaacctgttctttggccgggtgtggtggcttatgcctgtaatcccagcactttgggaggctgaggcgggcagatcactaggccaggagatcgagaccatcctggctaacacggtgaaactctgtctctactaaaaatacaaaaaaaaaaaaaaaaaaaaaattaggcaggggtggtggcacgtgcctgtagtaccagctactcaggaggctgaggcaggagaatcactggggtggaggttgcagtgagccaagatcacgccactgcactccagcctgggtggcagagcgagactccgtctcaaaacaaaacaaagcaaaacaaaaaaccctgttcttggactgggcatggtggctcacacctgtaacccctgcactttgggaggccgaggcaggtggatcacccaaggtcaggagttcgagaccagcctggccaacatgatgaaacccctgtctctactaaaaatacaaaaaattagccaggcatggccaggcgctgtggctcacacctgtaatcccagcactttgggaggctgaggtgggcagttcacgaggtcagtagatcaagaccatcctggccgacatggtgaaaccctgtctctactaaaaatacaaaagttggtgtggtggcgtgtgcctgtagtcccagctactcaggaggctgaggcaggagaatcccttgaacctgggaggtggaggttgcagtgagctaagatcgcaccactgcactccagcctgggtgacgagtgaaactccatctcaaaaaaacaaaaacaaagacaaagaaccgttctttagtaaaccaatcaacagcgattaattatataaaatgtgcaccgccttaggtggtatacatagcactatcagacatggctcctgcttttgaatttcttactttctagtaggggaaaatagaatatcctcaccccacagtgtgttactgtggctcaaccacatgaatcaggaaacaagagtagaggccattcggagcttgcagtgagccgagatcccgccactgcactccagcctgggcgacagagcgagactccgtctcaaaaaaaaaaaaaaaaaaaaagagtagaggccattgtggtgggtggtgaaacattacaagtactaaagccattgcttcagctttctttaacagtgtgaccgctgaaaaactaaatggttagtgttttgggttgcctctagtgagacatggctagacgtgcagattctaagcaaaggttataggaacttgaggttctgtagacccttaaggggttgggtcaggggtgtctatgatgctttcagaatgagtatatgctgaattttggggtctgtatattttctgcagagagagaatttgtagatttcatcaaattctcaaaggaatccatgacccaaaaaagactacaaccactggcttagagtaacactgagccccatggcctcattttgtctccgttttactttactgttctagattgagacctgccttttatttttccctgatacttatttggaggggtccttgatgcaaagaactctattgttgaacatctaaggaggagtatgtaagctttcttttttggaagcttgggtattatggctcttaaatcttcatcttttctgtcattgtttagtaaaaatgtctttctatttgaaataatgattactgtatttctaggtgcaagtattcattcatttgtcatgtatttatatgctgaggcccatgctgggcagtggtcatagagagatgaaatgaccagatcctggcccttagaggcttttagtgatacacatgtaagtgctcagaaatggtagctgttagtctcctgggaacagctattatatagtgtcatggccaaagtcatagaggatatacagggtagaacaggaacacaggagaggttatctagactatgtttcattgaaatttcactgttgattcatctcattagctcattgatgggttgcaaacctttgcatgagagggtgtaacagattaggtgtttggggcctttgccaaactggagaggtacagttggaaacacgacagtgactgaggctgtagctgtgacacatgtattcaaatggaactcacttaaaaactattgactctatttctctacttttctgtcgacaacagtatacggttctgtttgcccttagtcactcaggaggtatttattggatgcccagagggtgtgtaatactggactggacccttggactggactgtttacttactagaagagcagatggaaatgattgggttgtggctctttggcaatattctttgctgtctcccagtagtcagtatggtaataagcttccctctggtgggaggtaggatagttgggctttggaaatcaaaataccagagttccaaacccagctctgccactttccatctgggtagccttggccaggtcagttgatacctctgagccttggttttctgatgtacaaaatggggatataactatcacccgccctccaggacttctgccacatagtagagcccaataaatggaagttgtattgttactagcaggtgaggattataaaccatggaggaattccctcactttattgattcattaaggataattattatgttgtgcagaagaaggagtattctacttatgtgaatgggggagtttggaattcctagttagaaacagtggctcaatctctcatttttggccacttttcttaggctttttgctagggcaagttttttttttttgttttttttttttagatggagtctcgctctgtaaccaggctggagtgcagtggtgcaatctcggctcactgcaacctccgcctcccgggttcaagcgattctccttcctcagcctcccaagtagctgggactacaggctagcaccaccatgcccagctaatttttgtattttcagtagagacggagtttcaccatgttggccaggatggtctcaatctcttgacatcgtgatctgcccgcctgagcctcccaaagtgctgggattacaggcatgagccactgtgcccggccagggcaaaggttcttaatccagggttcctgaattttttgtgtaagtccattctattttctgggagaaagtgttcaagtttttatcagattgtcaaagggattcttaactgccaaaagattaagaattggttaactggccaggcgcgatggctcacgccttaatcccaccactttgggaagccgaggcaggcagattgcttgagttcaggagttcgagaccagcctgggcaacgtgatgaaatcctgtctttaccgaaaatacaaaaattagccaggtgttggccgggcacagtgactcacaaccgtaatcccagcactttggaaggccgaggcaggcagatcactgaggtcaggagttcgagaccagcctggccaacgtagtgaaaccctgtctctactaaaaaaaaaaaaaaaaaaaaaaaagaaaaattagccaggcctggtggcatgcctgttgtaatccaagctacttgggagactgaggtaggagaatcacttgaacccgggaggcaaaggttgcagtgagccgagatcgcaccactgcacctagcctgggcgacagagcgagactttgtctcaaaaaaaaaaaaaagaaaaaaaaaaagccaggtgtgctggcacacacctgtagtcctagctacttgggaggttgaggtgggaggatcactggagggaagtctaggctgtagtgagccatgatcacgccactgtactccagcctgggtaacagtgaaaccctgtctcaaaaaaaaaaaaaaaaaaaaattggttaatggacctgttgggtgggtatggagccacagttggtacctttgatcctgaaattgtccattataataagatattactgagagcaattttctaaagtacgaagtatgtaatgaagatacagggagaatattcagaagtttttgttggctgctttttttttttttttttctgccaggagtaggtgggacaagtataaaggaaagtggtatcaggaggaagtaagaagtaagaaaccacctaaataattgttagctgcttgtcctcatagttctttccataggttgattctgagttggggcgtctctgcactgtaccttgcaatcaggccggaccacttgctttttcctgaacactgtgttcaggctttgtatgttcatgaggtccctctgcctagagtatctcttctcccaacatttgtaagtccagttctccatgcatcagagcttcctggtgttgccttttagagttctcatcagcttataactccctggagagcactgactctcatcttcggatccttcaccgtcatggtcctttgcacatggtaggtgctaaataaagggttgtggaactaagtgaagagtgatacatatgaaggaaacaaacacctgtgtaagggagaaggctataaattaaaattttcagataccagtgaattctgcgggggagcttgggaaacccttagagtttcactgacaacctgaatagggggaggagcctgccctgagttaggaagcaggagtgtggggaacaggtagccagccataaggtcttggccaggtcatatcacttctggactggagttaacaccttcaaaaactgttcgggttggactttttgaacatataatagaggtgatgttgatgagcatctaccgtataccaggtactactctaggtcctgggaatatagtaggttgccaccagacaagaccccttcttttctagtgggaagcattgggtgggaagttagtcctttctagccttaaaatgctgtgattctgtcatctgaagaatgggcaccaacttctgcttgggattgttttgaggatcaaatgagaaagcactttaaagattataaaacacacttaccttgtttattatgaatacttctctccccccttggttttgccccccttggttttgacttaggttttttaaaagtttaaaattgaattgtaccaataggagtatgaactaatgatcccagggtttaggtagatttggggacttaaatctttcaataagtgatcctttagctagattgggatgtaggtttgtaatatcatcttcaccagtgaaaaatgtattgggggggaagtccatttatttatggatattttggatattttgtttctgccttaacataagttcgttcgttcgttctttctctttttttttttttttttttaagatttcaaactgtctctgccattattcttaaatacaactttatattggtgaaggctgcttgtcagggaaaaaccaaacttctctactgatttgggatttttttttaccataaattcagggtgcagttgttcttgaagtggttccattttgtgattaggctgagtatttttaagcacaactctctcccttgtccttagaattatctccagtatcctcaaaacaaagagcaaatgatgcaattaggatgcaatcccttgcctgtggatttcaaggaaaattattttccacactacttggaagctcatggacaaagtcaagctttctttagatctggtgaacttagaaaaaataacttgatgaagtgagattcttaccttgaggttagtttttgagagtggatcaatgatgtgaaatttctaagatattcttgatttataaatatcactttatgactcattccttggagcagtttttattttttcctttgaaaaactttagatgtaattgactttggtttacactctatcctgttttttggtttttttttttttttttttggagacggagtcgctctgttgcccaggctggagtgcagtggcacgatctctgctcactgtaacctctgcctcctgggttcaagcgattctcctgcctcagcctctcgagtagctgggactacaggtatgtgccaccacacccagctaatttttgtatttttattggagatgggatttcaccatgttgaccaggctggtctagaactcctgacctcaggtgatctgcccgcctcagcctcccaaaatgctgggattacaggtgcaagccaccacgcccggccatacttttagtgaaaggaaagccatgtatctttttctgctgtctcctatgtcatgtcttactctgccgttttgtaatggtccttgagattgagataatagagagagattttctagattttcacctactcactgatttttactacaggcattttaattcctttaaatttgagactgattttcttcccatagtatttaacttatcatcatccttataggagggccagacccttaggatttatgtgaatactgctagttggtaggaaaggtacttttcctgaagccttgaaagagtatttccagaatagtgagcttcatatttttttggtaacttttttttaaaggtatactttctgtgtaaatagaaatgaatttttgcaattggatgagggggaaaaaagctgaaatttaagggcaaaatcttttttttttttttttgagacggagtctcgctctgtcacccaggctggagtccagtggcgcgatctcggctcactgcaagctccacctcccgggttcacgccattctcctgcttcagcctcccgagtagctgggactacaggcgctcaccaccacgcccggctaatttttttgtattgttagtagaggcggggtttcaccgtgttagccaggatagtcttcgatctcctgacctcgtgatccacccgcctcggcctcccaaagtgctgggattacaggcgtgagccaccgcgcccagccgggcaaaatcttatagcatcttatcccttctatggtttgggaaattaagaaaagtgcacgttggtgttttctcacaatttaatgctcaggcaagtaaaatgatatccttaattgcaagttactgaagttgaaaggcgaccatttcccatcaattagaaatggtctttatggttaactctggcagaaattctgttcttctgtgaggcttgggtgatatcagtaatcctattgaggagagagcatattgaatcctctgactttgggcaaataatttagtctccaggtcccaatgcccttgtctgtgaaatgaagagaatacttacccttcccgggtggatttaaaaatctgtgaggaaggccaggtgcggtggctcatgcctgtaatcccagcactttgggaggctgaggcaggcggatctcctgaggtcaagagtttgagaccagcctggccaacatggtgaaaccccatctctactaaaaatacgtaattggctgggcttagtggcacatgcctgtagtcccagctactcgggaggctgaggcaggagaatcgcttaaacccaggaagcagaggtttcagtgagccaagatcgcgccactgcactccatcctcggtgacaagaatgaaaccccgtctcaaaaaaaaagctataaggaagcccagcacagtggctcacacctgtaatcccaagcactttgggaggcctaggtgggaggatcacttgaactcaggagttcagaccagcctaggcaacatggtgaaaccctgtttctacaaaaaattagccaggcgtgatggtgtgcacctgtagtcccagctgaggtgtatcaccggagcccgggaggtcaaggctgcagtgagtggttattgcgccactgcacctgcactccaacctgggcaacagcaagtccctgtctcaaataaaagctaagaaggcaagttttgtaatagtactttgagcagcataaggtacatatacaaaatattgtgggaaatatattatgaagttttgcatctaggtacataagagactgtttccctcacagtggagagctttggtaaaagagcaagtggattagagcagttgtagcttctgttttctccagaaagctcacgctgtgcagcagctgtttttgtccattctggctttgcagcagtgcagtattggggttaagccacgtgtgtgggcctcagaggcaggcagctggggccatactaagccgggtgatcttgaacgagtctcttgacctctgcaagcctgttttctcatctgtaaaatggggattataatagtagctgctctgttgggttactgtgagaaatgcttaatatggattgtagggcatgatttcctatggtaaggtttttagaagtaataatggaccagctaaaaatgttcaagcatttatctactgggcatgttgtctttttttctttctttcttttgagacagcttcttgttctgtcactcagtctggagtgcattggcgcgatcttagctcactgcaacctccgcctcccaggctcaagggatcctcccacctcagcctcccaagtagctgggactacaagcgcatgccaccacacctggctaatttttttttttttttttttggtagagatagggttttgccatgttgccagactggtcttgaactcctaaactcaaacaatccacccgcctcagcctcccaaagtgctggggttacaggcgtgagccatcgcgcccagccttcagcatgttgtcaaaggaagtatgaaaatgacaacaactgatggcccattttcatcagtcatcctggaaatcagcaagagtcaagctgctttgtgcacttattggggtgcacttattttctccaaggtgtccatttcatgaggcattttttgttaatggaaagctgggttagcaaatgcagtgatgaagggccataagtatagttttagtagttgttaacccttgaaggtagtgggtttattttgtctttttttttttttttacgacctccaacactttctatttatcttggcttaatataatacctgaaaatgaattttagttaagacttagagatttgtctaaacaatctccaagcaggttgaaaactgagactttcaagagccaggggatttgagtgtattctggattaacttggttcttcatctttccaagaaaggtaaactgtgttctaggcagtttttgtaatgggattttcaggctagatctttaaccaaaaaaaaaaaaaaagaggccctacagaaacttagaaacagcctttacagggtcaaggggagctttgacaaggaagaggcaaaaatctctgccccatgtgtcagttgaacttcttccaccttccctcaccagtggctacatttcagggctgaaagggctttggaatcctttgctgagtgctttggatgagatttgttttcaagttgctttttagaattagagtgaccatttacatggttttcattcccaatctgtgaattccaaagccttataccagtcaccaggcagatacgttacctaagaagtgcctacttttggaggccgaggtaggtggatcacctgaggtcaggagttcggctaacatggtgaaaccctgtctctactaaaaatacaaaaattagccgggcatggtggcgcatgcctgtaatcccagctacttgggaggctgagccaggagaatcacttgaacctgggaggcagaggttgaagtgagccgagatcgcgccactgcactccagcctggctacaatgcgagactccgtctcaaaaaaaaaaaaaaacaaaaagaagtgccctctgtgtgtaaggttctgaggaaacataaaggaaggattctcccaattccacaaaaactcgatttagtcaaaaaaatatacttattgactttcctaaaaaattaaaaagaaaaacaactaaatacacagccaactagcatcttcatttttagaactcaaaaattaattggaatatacctagggagaaattttctggaatttcattttctgggatattttttaaaattgctagtcctcattcctttgtcattttatatttcattttccatcttagttaatattgctgtttttatttcctcattctctgttattgtatcagttattgtccaatcaggaaagtagaaaccactctagatagttccagcaggaagggacttaaatgcaagggatttattacaaaggtgctggaaaggcttgggaggagcaaaatgcagaagagggttgttatccagagatgagaaagctgcctgtgggctagaacccaggagcctccatgcacagatgagctgctgctgctgctgctgctgctgctgctgctgctgttggagctgtattgctgcagttcaccaggaacccagaagccaaaactgcgctgatgtgctggaacctgcggtgtgtgtagttgcctgcattcttccatagttgttcactgctcctgctgctgctgctccccaagacagagcagtaacaggaaaaaagtggtgttatccttccacttgccaaccaatctccagcctttgaaaacctaactgtggaagccagctggcaaaggagtctgggaaatgtagtgtgcaggctttcagttctgctgatacggaggagaatgtagaagggcgcgtttgaccaaatgaatgctgtaattgcttgggtgatgcatttctcataacggagatgggcagagaaggcattattttacactgataacattcagagaggtggagaagaggcacagtggcattccagataaggggatagccagagtggtggtgtggaggcaggaatgctcatggcatgttcagagaatagcttagctggaccatagagttctttttgaaggatagctagaaatgaaggtagaaaataaggttgggttcaaattggattgagattgtggtagtaaaagctgtcttacaattaacccatgttgggtgtggtagctcacgcctgtaatcccaacattttgggaggctgaggctggcaatcatttgagcccaggagttccagaccagcctggccaacatggtgaaaccttgtctctacaaaaaaaatacaaaaattagccgggcatggtagcacacccacacatctagtcccagctactcaggtaactgcagcgggaggatcgcttgagcctgggaggttgaggctgtggtgagccataatcgcgccactacactccagcctgggtgacagagtgagaccctgtacaaaaaaaaacaaaaacaaaaacaaaaacaaaaaaaaaaagaagaagattaacccatagcactttacacagtgatttgagctgggatagaccaatgaggaaactcttatgatagctcaagctttaagggcttgaggactgtggtaaaaacctgtacattcaagacaaagttgtcttgaatgaattgtttctgtcttaagaactgaggctatggtagtggagttggagataaacagttcattcaaaacaagcttttaactgatgtacctgtcaatggcttggggcaagtaattggaataaataatgaattctgattttctgttgatttttctatataaattgaatttgttgattaccttatgctcttgaaaaggtcttagttctctcttttttatgcttttacttctctgggataatgccttgataagttagactcatcatggtattgttaggatcttccttgaagtggcattaaattcactttgatcataaactttattcataaatttgttttttgttttttgggtttttttttttttttttgagatggagtctcactctgtcacccaagttggagtgcagtggtgcaatctcggctcactgcagcctcctcctcccaggtttaagtgattctctgcctcagcctcccaagtagctggaattacaggcatgtgccaccacacctgggtaatttttgtatttgtagtagagacggagttttgccctgttggccaggctggtctcgaactcgtggcctcaagtgatccgcccaccttggcctcccaaactgttgggattacaggcgtgagccaccatgcccagcctttattagccaatttgaaacctgtgcaacaagttctgcagggccttgataacttgaggtaatacttaaattacttgtggacaggtttttggttttttctttggacactaattcattaattccatttaggaggtatttattgagccagcagtgtgtgtggtgctgaggtcacatgaggagcagaatagataagacattaaatccccatctttttggagttaacaatttaatgagaaatagaaattaaagaaaaaaaaaacattcctcggccttagggcccttgcagttgctgttcagctgcctggaatgctgtcccccagatgcccagattcttaactcccttgcctccctcatggctgctcccacgcctcctgctcagtgggacctgctctggccatccctttcagctctgtgcatactcctctaccacgtgccggggctttctccccattctatttccctcctaagtttgctttgtaattgtctgtttccctctgctagaatttaagttccatgaggcaggcatctttgtctcttttgttcattgctgtatccacatgcctagtacagtgcctggcacagtagtaggtgcttgctcagtaattttcattgaatgattgaatgggcgaatgagaataaataaatgagggcatccagggaacccaaggaaggctacagtggctagtgagaaaaaggcagaatggtggagatgagatcacatagggaataagaatttgagggtttaatataagagcaggccaggcatagtggctcacccctgtaatcccagcacttcgggaggccgaggcaggtggatcacttgaggtcaggagttcgagaccagcctggccaacatggtgacaccccatctccactaaaaatacaaaaattagctaggcatggtgacgcgtgcctgtagttccagctacttggaaggctggagcaggagaatcacttgaacccgggaggcagaggttgcagtgagccgagatcgcgccactgcactccagcctgggtgacagagcttagactctgtctcacacaaaaaaaatgatcaaatctgttctttaaaagataacttgctgctctaggagagcaagagtatacatgtgaagaacgcgtaaggctgtggggatccaggcgatctagattccctggcagcagatacgttggctttctcagctgttgaatttgagtgcccattccaagggtaggcattgattgttatcattctgattatacttgcatgcacttaggttatcattagcccctagagacttacctgtctccttgaagaacatcattgtccagtgatcctgctgacagatgagagctgtcaagatagcttggctgtgagatgccatttaactagtttttatctgtgtatgctttccctccccctgcaagatttaatgacctagccaggagagagtctaggcttcctggctcctctccaagtgttctaccactaaaatgttaatattacctttctcagaattcttctgaatcacttgttggcactgtaagtggctttttaaactttgattttgccatttttgagtctgtttgtactaggattttttgctggaggaatttgagctgatttgattacttaaagaaggccttttcacttacctttgctttttaaagttgagtagcctgtgataggtgggaatgtttctgccacctgacatgttagttggcaaagtagtagaggcagcctttaataaaagtcactctggaagaatattagttgggtacttagcattcttggcattcttatggaatgatacaggtttatggcctttttattaagttcttaaaatcaaatgatctttaattagaagcaatcatatataaaactttgtgactccagacaacactggccttactgtattctactatggagtggggtttgtgcctgtaggaatgcaggtttgggttaggggagcggagaaaggggtgtgagaaggccatattgaacacattgtagcctggtctgtgccatctgctcccggctgccttactggtatggaatgtggacatacagcttttgagcctagctgtaccttgcttggcttttagctctcatgattcaactggctgagcttagctttctgttacagtcagtaaggaaaatggagttgagcagcctgttttttgaactcaggtagtcatgaggcttgacaagccatgacacatatattttaatcgccacggccccctctaatgttttaaataagacagtagaggaatatttacattcaaggaacaacaagttatcacaaaactccccccaacatacacagcaagaaaaatgccaccttattctattgtatatgattcttcactgggcaaaaagggctctttatctgaatgcaatctatgatgtcctcagtgaagaaaactaaagggttggtgtgtatgatatcgcattttggtatgaacagattatatatgtttctgtgcccacacctgtacccttgaggagcggtaatagccagaagggatcgtggtgttagagatggcaaagctaaggctctgacaggctctcttaagttaaggccttgacagtgggttttctgagcagaaagcagaaatcacagatggattcaggggccggggagtggtctgcggcattggggagacacatgcaatagtgaaggaactgggttgagacacctactcatccccaaaccctctcttcattctgcacacagtaatcatattagctatggtacaagtttcccataagattttaacatagtaaatgccgtgggagtcagagtcggtctgctgacagggtttttataatggtgatgtacgttgttgtgcattgattttaagacgattcaaaagaaagtagctgctctgtgctcttcccagggccattcagagccagggagtgggaggtgaggccacggagggaaccactcagtgggtttatcttgggcattctgtgcatatgtaactgagaaaggtatgttgttacctaatgtatgcttttgataatttggaccaagagacatggtattctgaatagcagccaaatatatgaggtcaaggtgacttcctctagcaattaggacagctgtcatggaagagtaggccagacctgatttccttcttaagtccgagggctaaaccagtgataagagatgactcgttgatcttcctgatattactggccaagcactttctaaggaatgacgattgataaggaagaacaaactactattttggtctcttatctaaaggaaaatcatgaagctagcactttatagaaaatgcacttattcagttccttgtatgatcacaaatgttttcttagttatttttgggctccccaacaggatatgttacttatagtttgaaattcgcctttttttttttctctgaaatatatcttgaagtgttgagtggtggctaggtgccatatagaacatacaagcagaattttatagaagtatacatttagtgaggggtggagattattgctttaataaatgggactggctggatgtcattcttttttgtccccttcccagtcactttgactctagggtcttgattaatgtgatcatctctgcagagtgtggagagacagcactgggatgggggtgggaagtgggcgcaaagcctttcttagggcacagacagctctgacagcagtttctgggactgccttcccctctccccttcagcttccgcatctgtgacgtgagggagctggctgccagcattcccagcttggcctgccttccagtggctttcattcagagacagcagatcatgttcatctggaagttttcttagttgttcatctcaagaagaatcttaggaattttttttcaaatcagccagttttcctcagattttgcttcttctttatctgccctgttcctttggctaatcttctgtcagcgagacacagggtcatcagtttaagtatgggaaggaaattatggccttgagcacaggcagaaagcatctggctcccaggcgcttcctgtgagccaccatgaaattacaaagactgggcctgacaaggcctttcaaaggagcatctcacaccaccactgtgtcagcatttccatgattccatcgtaaagcagttgtttttcctgatgcttattatgaccaggttggagttggcctttacatgggaagcgtttatccagtggatgagagtgaaacagcaggacagaggtggcgggggagagggctcagattgctctcggaattcccttctccagcccggtcctgaccaagccattcttgctcagaagcctgtggttcctcagaggatgaagtccagactgtctttagcgtgtcaggaccctccacagacttgcccccagcgtctcccaccatatgtgcctatgctccgcgttcctgttctccagccagggcagtgcgggggagtggagggacgagagctgggggtggtgtcaggagacctgggttctggactggggttcctgtctatctagctgagttatttcatttctctctgtctcagtagttactaatctggataggcttaccaaatgagaggaggagaagaaaaggtttaggagacagattacaaggctctttctgattcttgtctcctggcctagcttggaaattagaacaccaaatgtctgagcattaaatgggtttttgaaccatgaagttttttgaacttcttaaaaacaaaaacaaacaaaaagaaaacactgtaggttgggcgtggtggctcacgcctataatctcagcactttgggaggctgaggcgggtggatcaggagatcgaggccagcctggccaagactgtgaaacctcatctccactaaaagtagaacttaaactttttttttttttttttttaatagatggagtctcattctgtcacctaggctggagtgcagtggcgcgatcttggctcactgccacctctgccgccggggttcaagagactctcctgcctcagcctcccgagtagttgggactacaggcgcctgccaccgcgcccagctaatttttgtattccaccccccccccccaagacagagtcttactctgtcacccaggctggagtgcaatggcgcgatctcagctcactgcaacctccacctcccaggttcaaacgattctggtgcctcagcttcctaagtagctgggactacaggcacatgccaccatgcctggctaatttttttgtatttttagtagagacgaggtttcaccatgttggccaggctgttcttgaacccctaacctcacatgatccgcccacctcagcctcccaaagtgctgggattacaggcgtgagccactgtgcccagctaattttgtgtttttagtagagatggggtttcaccatcttggccaggctggtcttgaactcctgaccttgtgatccacctgtctcagcctcccaaagtgctgggattacaggcgtgagccaccgtgcctggccacatttttttttttttttaacgtgggacaccaacatacaaaacagatcaaaagctaggtaaggtggctcacacctgtgactccagcactttgggaggccaaggcaagaggattgcttgagcccaggagttctacaccagcctaggctacatagtgagatcctgtctttacaaaaaataaaaattaaaaaaattaggcgggcatggtggcccagctacttgggaggcttggtgggaggattgcttgagcccaggagatcaaggctacagtgagccatgattgtgccactgtactccagcgtgggtgacagagtgagaccctgtctcataaaaataaacagaaacagatcaaattggacttgctctcttgaggctgaaaggtctgacatgccacctgttgagtcttaaaacctgccagttccatccagggctccccagggcactgcttctctgcatttcttctctcttgctatgcagccaggattagagtcacctgtttgacatgaccccaggcaggggcctagtgtagaagggggagattgtatagaaaagtgtataaagtatgtacgatttgaacaactataaagtgaataccaatataaccactacccaagtccagaaatagaacagaagctccactttgtatttagtattttccttggttccattcgttctgtttcttagcttcttagccttagcttcagtacagatgcagtagataaaataaaagccaatggcttttatatctccttagtctcaaagcaggaatccaaaacactgctttcaaatacagatgataaatatttgaataagaaataatattttggctgggtgcagtaggtgacacctgcaatcccagcactttgggaggctgaggtaggcggatcacatgagcccaggagttcgagactagcctgggcaccatggtaaaaccccatctctacaaaaaatacagaagttagccaggcgcgatggcacatgcctgtagtcccagctactctggcggctgaggtgagaggatcacttgatcctggggaggttgaggctgcagtgagttgtgattatatcatactgggctccaacctgggtgatagagtgagaccctgtctaaaaaaaagaatcttttttcttaataaaaaatattaataataagaaatatgttataataaattttgtttgtttttgagacggagtctcgttctgtcgccaggctggagtgcagtggcacgatctcggctcactgcaagctctgcctcccaggttcacgccattctcctgcctcagcctcccgagtggctgggactacaggcgcccgccaccacgctcggctgattttatttttgtatttttggtagagacgggatttcaccgtgttagccaggatggtctcgatctcctgacctcgtgatccgcccgcctcggcctcccagagtgctgggattacaggcgtgagccaccgcacccggcccccattcattctgtttcttagcttctttttttgtttgtttgtttgtttgtttgttttttgagacggagtctcgctctgtccagcagtggcgcgaactcggctcactgcaagctccgcctcccgggttcacgccattctcctgtctcagcctcccgagtagctgggactacaggcgcccaccactatgaccggctaatttttttatttttagtagagacggggtttcaccatgttagccaggatggtctccatctcctgacctcgtgatccgcccgcctctgcctcccaaagtgctgggattacaggtgtgagccaccggccctttttcttagcttcttaggttggccttagcttcagtacaggtgcattagataaaataaaagccaaccatcctttttaaaaggatatacatgtggtataacttttattacttgcgatagcctgttttgggactggcagtttacagaataatgcaagtgagtagtgaagaataattagaaataatgagctgaaatcctcatgtcatcctaacatgccatcaggaaatagtaagccttactgttggactcgaaaataagctgacccatttttccccattgacagaaatgcctgtttcttcagcactgtcctttgttggcaaggcacatttggctggacgcagcctccactcttcttgcgtcagggacatttatatagagaatgttctttcaaaaagaacttttttcctagtgagaagttttaaaaaaaaattagtagagtataactgcttagaagcaactgctggaataattttataggttttacttacccttttgaaaatcaatgtaaaattggtcttaatgccaggaaatttcaaaggtaagactcggctgtttttttgtatcttgacttggtaagaatctcagctcactgtggtaatggtaattatgctgtgatacctaggcttattggagtgcctccaatttcgaatttgccttggttttgtattccctttgacgtagaatatttttacagcttatcagaatcttggtttttgttgttgtttttcttaatataggtaatccagaaattatgctaaatcagtgagaaagacttcttagcttttgattttgtctttgtttatatttgccttatactttgatcagatagcttaattagaattccatagttacctggtagaaagctgctaaggataaagcttaaggaagtactttggctaaaagcggctccctttattcatcaggggaatttgatttcatcctgtggataacatagcttagaaattctgtttctttgggaccagcctgtagagttctgcaagcctggaagcatgagaactgtggcgggggaaaaatgggctacttgctgtatttagtgtgggctgctaggatggtaaggtagcaacatagttctgtattcccaccctggaattcagaagaacctttaagcagggattgcatggaggtggggaggacaaatcaagaggggcaggaggggacatttgcaaaaattataaatggaatgtcagagaatctttcatagctactctttaaaaattaactttagagccaagagtggtgtggctcacgcctgtaatcccaacactttgggagggtgaggtggtaggatcgcttgagcacagaagttcaagaccaccctgggtaacatagtgagacctcatctctacaaaaaaaattttaaaaattagccggccgtggtggcatgcgcttgtagtcccagctactcaggaggttgaggtggcagaattgcctgagccttgaagattgaggctgcagtgagctgtgattgcaccaccgcactccagcctggggaacagactaagaccatatttaaaaaacaaaaacaaaaaaactttaggccagattattttcaaaacaggcatgcgagttactagcccttgaaagtctactgatccctttgtggtttcctttggtcttctggagtgtgctgcacattgaatttatagagagtatagtgagagctgaatgcgcgtaatcaatatccaagaatctgttgcatgagacgacgtgtttcaagaccagataggcaaacactgaaatcagtctttctaaagatccagatgacccatttcagagactgcctgtacccagagccctagggacatagtgagattccatggctatgaggaaatcttcctctcacattgggtaggagtaagtgtatgtagcctatactagtgggaacaactaccccaccaacactgttctgggcaaatgtcactttcttttttccccttggcaaatcctggttttgcataccatccccacaatgttattattttatttttatgttttttagaggtggagtcttcctgtgttgcccaggctagagtgaagtggcttttcatagatgtgataatggtgcactgcagccttgaactcctgggctcaggtgatcttcccacctgagccccctgagtagctgggactacaggtgtgagccaccacacccagctcaatgttgttattttaatttgcattggactgaaaggtagaaatataattgctatattcaaatggagttttcgtttatgtaagatgattaactccttagactgtgttaatttgttgggtgagtagttaaggtagcagtgtacaacaataaataactcaacggggtaaaagattattattattattttgagatggtatctaactgtcacccaggctacagtgcagtgatgtgatcatagatcactgtaacctcaaacttctgggctcaagcgatcctcctgcctcacccttccaagtagctgggaccacaggcacatgccaccatgcctggttaattttttattttttttcttttattttttttgagacagagtctcactctgctgcccaggctgaagtacagaagtgtgatcttggctcactgcaacatctgcctcctgggttcaagccatcctcccacctcagcctcctgagtagctaggattacatggcatgcaccacctcacccagcgaatttttttttttttttgtattttggggtttcaccatgttggccaggctggtctcagactcctgacctcaagtgatctgcccactttggcctcccaaagtgctgggattacaggcgtgagccaccacacctggccaatttttaaaatttttgagacagggttgcactctgttgcccaggctggagtgcagtggtgcagtctcagctcactgcaacctctgcctcctgtgctcaagtgatcctcccacttcagcctccccggtagctgggacaacaggtatgcatcaccacagccagctaattttttgtattttttgtagagaaagggttttaccatgttacccaggctggtcttgaactcctgagctcaagtgatccacccacctcagcctcccaaagtgtagggattacaggtgtgaaccactatgcccagcctaaattttttgtagagaagggttctcactggtcttgaactcctggtctcaagcagtcctcccaccttggcctcccaaactgctgggattacaggtgtgagccactgcgccctgctcgattattttcatatttgattctcagagtaaacatacagcttgttgataatctgagccccgactgcccatctcatcttctgtctcccattcttggaaacccttttccagtcaatctgtcccaaaacatgtttattgctttcccattttagccactattattcatgccttttatgtcacctctccaaactctgccagtcttttaagaaccaattcaaattttacttctgcctgatgcctttcccacttactccagattgaatggtttttctttctctggatcccaggaaatggtctataccatttattgtcttatggtttggctattttttttaagtgtaaatattgtatctcaagtaaattataagatcctcgtcagcaaagacagtacccattccttttgtttcatcacattttctttgctatgtgagtatgcatttgatttgggtgatggacagttcagtccttaattccaaagattatggtaatacaaaaatgattaacactctgaaatatgcagaaaggagggaatttagctgctgtataactagatctatcaaatggggacctttctcttttactcagctttagagattctgttgtccttgttgagtttgatggaatccttctgtaagatactcttcatgtggtaaacagatgagtagaataggggtattgcttcagattctgacaaatcatacacagaaaatgaaaatgccctctatgtctcactcagattcaaaaagattataatccccttttacacctaaatgccctaacacatcatttttgcatattactaattaaggttctctaaattcatctggattttacagatgaatgaattggatgaataaggaccttgaactctatttccaacttttcttctctaatttatctttattcaaaaggaaaaacaaaaaccctaagaaaatttactttagcatttattaatatgaaaatggaagcattgggttttaagaaaatgttttgcttaaattcagtggtttaataagccagagaatagtgttcccttcttttctttttttttttttttgagacggaatttcactcttgttgcccaggctggagtgcagtggcactctctctgctcactgcaacctctgcctctagggttctagcgattctcctgtctcagcctcccgagtagctaggattactggcgcccaccaccatgcctggctaatttttgtatttgtagtagaggcggagttttaccatgatggccaggctggtctcaaactcctgacctcaggtgatccacctgcctcggcctcccaaagtgctgggattacaggcatgagtcaccgtgcccggccagtgttctcttcctttttttttttcttttgagacagagtcttgctctgtcgcccaggctggagtgcagtggcacgatctcggctcactgcaagctggccttccaggttcacgccattctcctgcctcagcctcctgagtagctgggactacaggtgcccaccacctcgcccagctaattttttgtattttttttagtagagacaggatttcaccatgttagccaggatggtcttgatctcctgacttcgtgatctgcccacctcggcctcccaaagtgttgcgattacaggcatgagccactgctcctggtcgtgttctcttcttattgaaacttttatatcccatccttcctggcctatttggtaagtattaatacattcctctggaaaacttccatgtctacctgacatggaaagtgcttcctacatagatatatttcttgttccacccctcccaccccccaactgagtcttttcaagtgtctaccaaatgcaaacattttaaccagctgctaatgggaactcatagctttgaagacttagaaatgtaagatattgagaaatacgaggttttaaggaggtttgaagaatgcttttttgctttctgttagttacgatgtatatttccatttatttcccctattgagattaaggaaaattgtgataacaagtattttacttcctttgcttgtagttctgtatgaaattatttccttacagtgttactagttggtggtgttctgtatgtgattatttgaaactcagtgtgttttcagaagttgttgaatattctcaggtggagatggtcatttttattatggataatggtggaagatttttgtcttagggggcattctagattacagagcacacaaacatttcctacttcggggagagagggatgaggttgctgtgttggaagagtgatacacacgctgtgttggaagagtgatacacacacttccaggcgtatgctgatagagctgttgacagtatgaactttcccagtcatagtaaatctgggatcacggtggcatttctaggtcctacaaaaatgtgtgctatcttgggaatgttaccacttcttgccctgagtgtttcatagaggtgttaaaaaagaaaacaccctccttctaccttccagttgcggcactctggtggggaccttgtgtcttggttaaacaaatcacaaacaactctagatgcttggtgacagtctgaagaaggcacgtagatatttgcattatgttttattacagcatgtatttgtgactgagaaaccaaaatacttctgaagtattttcctctctgaagtagttgactcttggcataaaatgggaaactttgaagtcctgtgtttctgtttttctaatgaaatatctctgtacagctcaaagataaaagtaattaccatttttaaaggatccttctttcccctctgttttaactcttccatttaaaaaggattagcactggaaaattattagaatggacattcagattctgttgtgtatcttagttgcctgctaagaacactggttcccatcacatttaaactctaaagacattgtgaagtctggatatgcccggtctcctactttctctttctttgtggccttcagatcattaaatttagtgactcagctaattttttttacccacctcttagaactaagttgaatgtatttgtgaccaagcacttaaagttatttcctctaaaccaagtgtttgagatgtttttagatttataacagtctttgtttaccgtgtaattcagtccaattgaggaactagtaaaactgcattatctagacatcaaagctaagaagagtatacttacaccaagaaacttattaggtttctaacaagtggaaagttaccaggtgtcccaaaattaaccacttccatgccagctgattttcactttttgtagctattttaatgatcagcagcattctgggtttaaaaataacagtcgtggctgggcacagtggctcgtgcctatgatcccagcactttgggaggctgaggtgtgagtgggaggattgcttgaggccaggagtttgagaccagcctgggcaacatagcaagaccccatttctaaataataataataataataaattagccaggcatgatggcttgcacctgtagtcccagctacttgggatgctgaagtgggaggatcacttgagcccaggagttggaggctgcagtgagctatgattacagcactgcactccagcatgggtgacagagcaagactccatctcataaaataaaataatcagttctacattattcagagttgagtgttgctttctttagcatccttcaaataactgaaaatatgccattaaaaaatataaccaaggtgttgaatggataatacattttagttcatttcaaaatagagccaatatctttatttcttgaggtttgagagcaggctggtgttttgttctgtttttccttcagatttctgtgaagggataaatattagacccactttacagagaacagttgagtcacagacaagggatgacttgccaattgcatgcagaggtcactttaagtaggaccagtgctaccaagttgcatttcaagattggtaaccttaagacctgacagaccctggggtcaggaattgatagagaaggactctgttagatgaggacccatgacttcctcaacccttcatcagcactcctgtctgaggctctgttcaacctaagtttcttcatggattgaaacaaaattatatgtgcatattacagagtaattgattgtgtacagatgcttcctttaggtatttcagaggatgtgtgtaaacatgctttagatattcataagcatcttataattttgtttatgtaagcaatcgcctagaaaagtagaggatgcgaaaggtttgtttttctttcccgtggataccttgcttgttcctgctgaattctagaacatggcatctttaggaacatgccattatctggaggcaattgcctacagtcattgagatttttctttttaaaatgtagtttttgcatactacgtctagtcacattttgtttccatagagggtttggctttctgggatatcagaaggaagctatggatgtttggaaaaggtctgtgaccttttgaggttatcatcacaggggacaattgcactctcccattcattgctccctggtgtcagtcagaataatgcgtggtggtctgacttccagtggcatttcttatgcaataggcttacaaaaacataatgaggtcatggcaagcctaggttcctacagacataaatgagattcagaagaaaattgctctgttcatttcagattctcctctttgtgattgtcttgagagaatgttcatttggctgcaggttcagtgcttgcacagttatattggagtatctaagtaaactgaagtgcagcataaactgtcgtagctggaaagttgctaaagactgtaagccataacagtttgtttaacttaagctgttaaaactttaggttctttaaggtgccatttttttggccacattctgtggttccccatagccttcaggaaggaatccaaactcttttttttttttttttttttttttaagatggagtctcgctctgtcgcacaggctggagtgcagtggcgtgtctcggctcactgcaagctccacctcccgggttcactccattctcctgtctcagcctcctgagtagctgggactacaggtgcccacctccacacccagctaatttgttgtactttcagtggagacggggtttcaccatgttagccaggatggtcttgatctcctgacctcgtgatgcatccgcctcggcctcccaaagtgttggaattacaggcgtgagccaccgcgcccagcgaaggaatccaaactcttaaagtggtttgatccagtccctggttccttgctaatgcatcttacccattctttccccacacacactttgttccagttggttctcccaactggcagtgcttttttttgcggagggaagggtctgtgcacactctgtccctctgtcttaaatgcacttcatacttcaggtctcacctgagatggaacttcctacagaaaggctttcccgaatctgaaaggctgggcttggggaccttttaatatgctgaatcatcattcagttattgattctttcagtgaatatttgtgtcaagcactgtgtcataggctgaggacacagaatagaactaaacaggggacaggcctcacagagcttgcattcttgtcagggaaaccatctcgtatttacacacttaatttttttttatttggaaatgattgaaaacttgtaaaaatagcacaaaggaatatcctatatgctttacccagattcatctatttttttttttcagattcatgtgttgttaacaatttaccaccccatttgtgttcttactctttctgtatacataatttttccagtgggatcagttacgtacattatggcccttcccctcaaaatactaaggtgtcagtttcctaaaagtggagacattttcacatgatagattttatagatttacattgataaaatattttatttgggaggatttatccttcctgcatttcttttttttttcaatcttttttttactgtgttaaaatacacaaaacataaaacttgccattttaatcatttttaactatacagttcagcgatattaaatactttcatgttatgcaactatttctgtaacactttccatcttgtaaaactgaaactctgtacccattaagcagtaacttttcattcccactttccccagcccctgacaaccactgttctactttctgtctctatgagtttgactactcttaagtactgcatataagtggaatcatatagtatttgtctttttgtgactggcttatttcacttagcacaatcaagattcagccatgttgtcagaatttccttccctttaaaggctgaataggccaggcgtgatcgcttacgcctgtaatcccagaactttaagaggccaaggcaggcagatcgcctgagcctaggagtttgaaaccagcccgggcaacatggtgaaacctcgtctctactaaaaatacaaaagttagctgggcacggtggcgcatgcctgtaatcccagctactcgggaggctgaggaaggagaatcacttgaacccaggagacggaagttgcagtgagccaagatcgcaccactgcactccagcctgggctacagagcaggactctgtctcaaaaaataaaataaaaataaaggttgaataatattatattgtatgtatatatcacattttgcttatccattcatgagtaggtggatactttgggttgcttccatgttttgttgttgttgctgttttgagatagtcttactctgttgcccaggctggagtgcagtgatgagatctcagctcaccacaaccactgcctcccaggttcaaatgattctcctgcctcagcctcccaagtagctgggattacaggcacatgtcaccacacccagctaatttttgtatttttagtacagacggggtttcaccatgttggccagactggtcttgaactcctgacctcaggtgatccgcccaccatggcctcccaaagttctgggattacaggcgtaagctaccacgcccggcccaggttcctgtttttgcagtgggtttataattcattaccatacttaattattgtggcgctcaaattgtcccagagttggccagtgggagccccttcaggctggcttctgtgtccttgtgagatgctccatcgttttttttcttgcataaaaagatgttccaggctcattttgtccctatcctgccctaaccctggaatcagccctttttccagggagccctcacacccttgttttagcacttagcacactgtttacttatgttttcctccactggactagattgtacctctctggggacacatagatgtgagtcttacttgctcttgtatcttcacccagcacaaggcctgacacatgagatgtttactaaatatttgttgaataaaaaattaatttttactgtagttaattgattaaaatttggttctaaaattatgatgctgatgggttttctttttttttcccccatctaggaagaaatgttggctatttggcgatgagaggtggtgaacagtgaccatactggtatacaacactatgggacctggcatttttgctgcatgtccagcccacccccactaataatgtaggaagctgtctggtccattggaaacactaatctgatctcagaagtggctgatcgtggcaggatgtgtcgacgatgatgatggcaagaaagcaagatgtccgaattcccacctacaacatcagtgtggtgggattatctgggaccgagaaggaaaagggccagtgtgggattggaaagtcttgtttgtgcaaccgcttcgtgcgcccgagtgctgacgagtttcacttggaccatacctccgtcctcagcaccagtgactttggagggcgagtggtcaataatgaccactttctctactggggagaagttagccgctccctggaggattgtgtggaatgtaagatgcacattgtggagcagactgaatttattgatgatcagacttttcaacctcatcgaagcacggccctgcagccctatatcaagagagctgctgcgaccaagcttgcatcagctgaaaaactcatgtacttttgcactgaccagctggggctggagcaggactttgagcagaaacaaatgccagacggaaagctgctggttgatggttttcttcttggtattgatgttagcaggggcatgaataggaactttgatgaccagctcaagtttgtctccaatctctacaatcagcttgcaaaaacaaaaaagcccatagtggtggtcctgactaagtgtgacgaaggtgttgagcggtacattagagatgcacatacttttgccttaagcaaaaagaacctccaggttgtggagacctcagcgagatccaatgtaaacgtggacttggctttcagcaccttagtgcaactcattgataaaagtcggggaaagacaaaaatcattccttattttgaagctctcaagcagcagagtcagcagatagctacagcaaaagacaagtatgagtggctggtgagtcgcattgtgaaaaaccacaatgagaactggctgagtgtcagccgaaagatgcaggcctctccagaataccaggactatgtctacctggaagggactcagaaagccaagaagctgtttctacagcacatccaccgcctcaagcatgagcatatcgagcgtaggagaaagctgtacctggcagccctgccattagcttttgaagctcttatacctaatctagatgaaatagaccacctaagctgcataaaagccaaaaagctcttagaaaccaagccagaattcttgaagtggtttgttgtgcttgaagagaccccatgggatgccaccagtcacattgacaacatggaaaacgaacggattccctttgatttaatggataccgtccctgcagagcagctatacgaggcccacttagagaagctgaggaacgaaaggaaaagagttgagatgcgaagggcgtttaaagaaaacctggagacttctcctttcataactcccggaaagccttgggaagaggcccgtagttttattatgaatgaggatttctaccagtggctggaggaatctgtatacatggatatttatggcaaacaccaaaagcaaattatagataaagcaaaggaagaatttcaggagttgcttttggaatattcagaattgttttatgaactggagctggatgctaagcccagcaaggagaagatgggtgttattcaggatgttctgggagaggaacagcgatttaaagcattacaaaagctccaagcagagcgtgatgcccttattctgaaacacattcattttgtgtaccacccaacaaaggagacatgccccagctgcccagcttgtgtggacgctaagattgagcacttgattagttctcggtttatccggccgtctgaccggaatcagaaaaattcactctctgaccctaacattgatagaatcaacttggttatattgggcaaagacggccttgcccgagagttggccaatgagattcgagctctttgtacaaatgatgacaagtatgtgatagatggtaaaatgtatgagctttccctgaggccaatagaggggaatgtcaggcttcctgtgaactctttccagacgccaacatttcagccccacggctgtctctgcctttacaattcaaaggaatcgctatcctatgtagtggaaagtatagagaagagtagagagtccacgctgggccggcgggataatcatttagtccatctcccccttacattaattttggttaacaagagaggagacaccagtggagagactctgcatagcttaatacagcaaggtcaacaaattgctagcaaacttcagtgtgtctttctcgaccctgcttctgctggcattggttacggacgcaacattaatgaaaagcaaatcagtcaagttttgaagggactcctggactctaagcgtaacttaaacctggtcagttctactgctagcatcaaagatttggctgatgttgatctgcgaattgttatgtgtctgatgtgtggagatccttttagtgcagatgacatactttttcctgtccttcagtcccaaacctgtaaatcttcccattgtggaagcaacaactctgttttacttgaactaccaatcggactgcacaagaagcggattgaactgtctgttctttcataccattcctcctttagcatcagaaagagccggttggttcatgggtacattgttttttattcagccaaacgtaaggcctctttggctatgttacgtgcctttctttgtgaagtgcaggatattatccctattcagcttgtagcactcactgatggcgctgtagatgtcctggacaatgacttaagtagggaacagctaactgagggggaggagattgctcaagaaattgacggaaggttcacaagcatcccctgtagccaaccccagcataaacttgagatctttcacccattttttaaagatgtggtggaaaaaaagaacataatcgaggctactcatatgtacgataatgctgccgaggcctgtagcaccaccgaagaggtgtttaactccccccgggcaggatcaccgctctgcaactcaaacctgcaggattcagaagaagatatcgagccatcttacagcctgtttcgagaagacacatcactgccttctctgtccaaagaccattctaagctctctatggaactggagggaaatgatgggctgtctttcattatgagcaattttgagagtaaactgaacaacaaagtacctccgccagtcaaaccaaagcctcctgtccattttgaaattacaaagggggatctatcttatttagaccaaggccatagggatggacagaggaagtctgtgtcttctagcccctggctgcctcaggatgggtttgatccttctgactatgctgaacccatggatgctgtggtgaagccaaggaatgaagaagaaaacatatactccgtgccccatgacagcacccaaggcaaaatcatcaccattcggaatatcaacaaagcccagtccaacggcagcgggaatggttctgacagtgaaatggacaccagctctctagagcgagggcgcaaggtttccatcgtgagcaagccagtgctgtacaggacgagatgcacccggctggggcggtttgctagttaccggaccagcttcagcgtggggagtgatgatgagctggggcccatccggaagaaagaggaggatcaggcatcccagggttataaaggggacaatgctgtcattccatacgaaacagacgaagacccgcggaggaggaatattcttcgcagcctaaggaggaacactaaggtaagacaccagtctaggattagtcatagtgttttgtacagcgtctcggtgagggttgattgatgatgatttttcaaggacaacctattctggtaaaaaaaaaactgccctgtgtgtgtatttgacttaacataaaaaagcagtgcctcaattagctaccattattggcagctctcaagtagttaggactttggatagatagtctgagttgttgttgcctaaaacaatagttaattaattagcaaaatgaggagataatgcagaacttgtcagtgtcttgacaagtggccaagcgcagtgacaatacacttgctctcccttcactgaaacaccagaactcaaaactgcttgccgcagtctctcactgctaaacataacatttcatccatacatctcttaaatgatccttcctcccttgctgatctgtaaaggttgctgcatttgagattggtgaaggattggatgatgatttgcacacacaaatcagtgacgagtctttgagtacataaatgaaaaaagagaatcttgccactgagagttataaacctgtcccgtatttgttaaattggaataccatccagtctattattttatcttcaagggagttgctgctgctatcagtcagaaactcggattttatttagggatcacaaatggtgcagggagagaaaagaaaaagttaactgtatacattataaacattgggcctactcgtcatatgtagagacaggagcaaatgaagtctcttttttttttttttttttttgagacggagtctcgctcagtcacccacgctagagtgcagtggcgcgatctccgctcactgcaagctccgcctcctgggttcacgccattctcctgcctcagcctgctgagtagctgggactacaggcgcccgccaccgtgcccagctaatttttttattttattttattttttagtagagacggggtttcaccgtgttagccaggatggtctccatctcctgacatcgtgatccgcccgccttggtctcccaaagttttgggactataggcgtgagccaccgcgcccggctgcagatgaagtctcttatcctgcgtagaattgtagtttgtagtctgcagggcagagagctgtaagcagtactctgtccccttgggtttaggctttgagaaagaaaaagcgtttctcaactttttctttttcttttttttttccatttggagtagggagaaatactcttcccccccacccccaattgccaaggctgatttagaaatactgaaatactctttacaggccaggcgccgtggctcacgcctgtaatcccagcacttttggaggccgaggcgggtggatctcttgaggtcaggagtttgagaccagcctggccaacatggtgaaaccctatctctactaaaaaagtacaaaaattagctgggcgtggtggcaggcgcctatagtcccagctactcaggaggctgaggcaggagaatcacgtgaacctgggaggcagaggttgcagtgagccaagttcacgacactgtattccagcttgggcaacagagggagactctgtctcaaaaaaaaaaaaggaaaaaggaaaaaaaatgtgtatatatataaatactctttattttttcagaaaaagacattttggtgacatgccacaacagaactgtgttatataataatccttcaccagcagattatgatatatagaaggattttttcacgttaaagcttttgctactctccctcccatgaaagaacagagaacagagttacttgtctgaaagtactgcagggacctctggaaagaaagattgccagaaacttttattattacaaatcctaccaaatcagaaggttctagaatccaggctgtcttgagagctgacaatcctgacaactctgttgtaaaatgtaatacagaggccagtttggcagccctgcgggccccgagagatggaggaacagggtgccatcaccctcccacagaaattgcatccactttgtgctacatcccatagtagagagtgttcctgcattaccgctgaccaggagcttccagagttttctcatctgtgcagtgtgagaaagggcagagtggttctgtatccctccccacctgtgctgactattaataaatgccataggcatcctcctgtctgattttcctttgcctggcttttctacatggagtcctttgtctgcctccagtgttttctcctccaaaggttggtaggaggccaccctgtggaaagcattgcttatttaggaagccagaaaacggcctgacttgcctccggtattttcccagagctcacctatttaatgatactggaatccaaacattttgaacatttcttctcttcctcctcctctcccaatgaagactgttgccagaacagcttaaaaatgctgacagtcttctaatttgtgggggtgtttgcacacctggaaattaggaaggtggcataatagcatactgaattataactatattctgacttctagctacatttttaatacttactgaaaatgatgctttaaaaacacattcccatgcaagccaggctttaaagagcacacactgtagtggaggctcagcagaaaacagctgatcacagtgtgcctctaagatagctgtgttcatgctggtaatgagcacttcctaacctgagacttccttccccgggttgctgggtcagcgtgcaagaagtggtcggcttccggtctatctttagctatgtgggccacacctcttcaagtcaaataaaaatgatacttctggcccaagagcaatagcgtgccagaagtcagttatggagtatcctctggaaagagtgactagaaggtgaaattttcttttcctgccttggaaaatggtgctttgaaatgagggtagttgctttgtcatcccagtgcagagatgagcaaatcctttgccgctagagcaaacctcctattaaaattgctgcagttcggaacacagactggcacttgttttactggaaaagcaagatgccatcaggggagagaagggccaagccaacccctgtgtgggagatttggcctttggtttttattggcatgacaaagcaatacaatatttatttggagggagggggcagctaggcactaggatttcagttggtaagggaaaatacactgagtacctcctgcgtgccaggcaccatagggaaatgacacagacccttcttgcccagaccttagtacccagttgaggcagcaaggcctacacagccactgaaaataggtggcctgcccagggaaggctatgtgtgggcatgtcgggttagttatgttagagtaggttgtagtgattaggagctcaggctctgggaatctgggctacagtcaactccagctcctccgcttccttagttggactttgggcatgtgagtcacttctccacattctttctgcaaaagagggagcaccttcctgatcaggttgtgagaaatgaacaccgggcgtagtgcatgctggataagtgtcagctgtcatcatttaactagaccccagagaatgagtggaactaaagcagtggcatgaggtaaggaaggacttgaaggtggaaatatgcatattgtattccgagaaaggagaaaacttgtctggtctagctgagggcttgagggaccaacattatccgtcccgtcttttggaagttttaacctcatgcattactgagctgctttcttggtacttaccctagcaaccaccctaacaaaaaaatagctatgctctgggtaccaatgtgatacagaaaaaaatcactcagtgcccttggctgatttgctagattaggtctttactataaaactggagtcggagtgagggaatcgctttcatttctcctcatgaaagtgcagactgtaaagctgactctcattctgggtgcttttcccagctgaaccatttagcaacccaccctcatagtgggagccttccgcactcagctgaatgaaattgaaaatctacgattgcacttcagtagggtccatgaatagtggctttgtctgtaaagagttgttgttgcacatggtctctgtctcccagtgccatgcgtttgcaaagacgagatcaggatcggcagggtcttattttaaagccaaaaaacaggctggggagccttgttccacaaagtatgccttttggtcatgctgaaatggctgcgtttggtgtgtttgactgtggatttaaaaagaagacattattggctatttacccttctatctgatgtgttcttattttggtgctaaaaaaaaaaagacaaaacagaatgataaagaaaatctttcactcactgcagcaaccacatgacaagacaacctattgaaaagctaaccaattcaatcatgcattgtttggtctataaggcaccaagtaaccagtttgacagtttgtgtccccccctagtgaattggcttatttcattggattcagtgaattggctggttgttgtggctttgtgtggacacagctctcattttgtgaggcctagaatggagttaaagtttctagtgtgaataaaaaccagctggggaattggactgcttgctcccctgggagggatgttgagttttgacagacaagctgaatgcgatgaaatatgagctctttgtaacctgcctaggaaagactctcagtgtgtgcttcagaaatagtcctactcaatgagctttgagaccaaatacataacttggttttaaaaatggggtgggcacactgacttgaccttggattttctgtttcctggaaaaattgtgtcttttaaacgaggtacttttgtttccaagccgaagttcagtcattcttttaggaaggagacatgcatttcggtgcgtgggcattcagtgagcacttgttttatgcccagcattgtgttgggtgccctaggtgtggtagtgacgttaatccagcttacagtcttggggatgttaggttttaaacatgtacttgcatgcattttgaatattaccagagggaaggtacaggatactaaggaattgtgtaacaaggaagtttaacctaaactgcggtatcaggaaagctccccaaggaaatgatatttaaggctgagactttggaagctgaggcagacaaagtcagtgaggatggaagcttcatggagctgaaagaacttcatgtgttcaaagagttgaaagaagcttagcgtggctgctctggagaggtgagggggacccacgccaaataatagagggctgtggctaccacgtgaagggttttgtgtttttgtgcatttattgaatacttactgtgtgccaggtacgtgtcaggcattttcacatcaattttttatttattcctcctcccagtcttaatgaggtgatgtttttcatccttgattttgagttgaggtaactaaggctcagagagattaaaccttgcccaagtgagtgtagccactgagtggaagagctgagattctgaaccctggtgttctgacttccacttcctgtggattttcatcatccagtctgcagaaaagttgctaatattcaacagtcaggtgcctatatttagaccactcaatcagtccagtcgatttgttcattcaaacaaaagatctttgattatctgaaaaaatccatttctcctcactgccccccagaacagcacggtgctgtttgtttctagcttcagagcctagttgagtagaggacaaaaaaggcatggagacattgaaatagcaactggaactttgagaaattgtttctcactggtgtcactcgattctcagtttattttaagcctgaagaacttctgtagtgtgtttttggtgataaaaatagactatctttaactatctgccttagcttacagcatacctgttcttaaaaaaaaattacgataggcaacccaaatctgtttttaaaagaactgggaattgtgctgatgcctcactgagccaacttggtctcctccaccacctggtgatactgaaatacctttgtagggactcaaattattccagctctagtcaggaatcacctttgcttataaggcaaaggccttccaaatggattttctacagcatttgagagaagcaagcaataagaactgacccatagcgttggaaagtccaaattcagtgtgtgttgaacttcaggcaagtgttcatgaaaatgtacctggaactagtgggccctcctcgctgtttggctccagatcacactggccacgagttgtcttctcgggggggtggatccgcggtcaccagacttcatgccttaatagaacaaaaagctatggtctgcgctgggcgcggtgggtcacacctgtaatcccagcactttgggaggccgaggcaggcacatcacttgaggtcaggagttcgagaccagcctggccaacatggcgaaaccccgtctctacaaaaaatacaaaaattagccaggtgtggtggtggacgcctataatcccagctactcgggaggctgaggcaagagaatctcttgaacccgggaggcagatattgcagtgagccaggatcatgccactgcactccagcctgggcaacagagggagacggtctcaaaaaaaaaaagctatggtctggatttagttaggtcctgcaataggatgacatgtctccgtttctttctccattatttaagattagggatgacaggaaggccaggactttgtggtccttcctgttcatccgtaaataaagatgctccaagatggtgagtgactgagtcatggtattaactgccagcttgaaggagaccatatctaagcatttgtgctttaataatagattttgtcagcaagaatacatctgccttcaggttttcttttaaacttgggcgtggaatttttcagagcccagaagggggagcaccggttaaccaagaatacatttggagcataagcaaataacttaattaaaaaggtccttttggaactcttttggaaatagaagagaataattgccaatcagaaaggcacgatgttgaatactgaatgcaagaaagtggtttagggaacagctgtagtaatgccacttatggaatctttccgattttctaagactctaccagttacagttagtccatagtatgctaccacacaacttggcaagccatgggtgtgaccctctggggctctgtgtattgatttcactctcatcctcattcagatggcactgtccatgttccagactacattccgtatatggtgttacctgttactcttttttttttttttttttttttttttacataaaacattaacgccgggcacagtggctcacacctgtaatcccagcactttgggaggccgaggtgggcagatcacttgaggtcgggagttcaagaccagcctgacaaacatggagaaaccccctctttactaaaagtacaaaattagccgggcttggtggcacatatatgttaatcccagctactcaggaggctgaggcagaagaatcacttgaacccaggaggtggagtttgcagtgaaccaagatcgcaccattgcactccagcctgggcaacaagagcgaaactccatctcaaaaaaaaaaaaaaattaaaaaaattttttaaaagttggggtctcactatgtttctaggctggtctcaaaactcttggccttaagcagtcctcccatctgggcttcccaaagtgttgggattacaggcatgagtcactgcacctggctggtgttaactgttttttaaaaaggccagacatggtggctcacacttgtaatcccaatgctttgggaggccgagtttggcagattgcttgagcccaggagtttgaaactagcttgggcaacatggcaaaactccgtctctacaaaatattatctgggcgcggtggcacacacctgtagtcccagctagttgggaggctgagatgggagaatcacctgagcccagggaggtcgaggctgcagtgagccatgattacaccattgcactccagcctgggcaacacagtgagacgctgtctcaaaaaaccaactagaaaaccgagttccgatgcctggttccccaccaccccacctgcttccagtccagttaaatcaaaatcactagggctggtgtccaggcactttgaaaaaaaaaaaaaaagacaaaaaaaggcagtgaatccaacaggctgggttctgttttttatttcctttattagatgtgttaccaagcatttaaaaggtttaaacggctatactagatggtacaactctagtgaacatattttctgactctaaaatctagataagtaactttacatttataaggttgtttatggagaccaaaagagaatatttgaagttgacagcgtagggtcagtaagtagccctccctgctgttcccacagaagatagaatattcttacctttttccattgttgcatagctggtacttgctcatgtggtacctagatgagctttgtttattgtggatatgtcttctgttaccaaatagattggaagttcattgagggcgggagacgactttggtcctagtattagctctgctgccagtttgttatgtggccttggggtgattcataaattcattaaaaaaaaacaaaccaagactcttgccttctaggaacttagcctagtagaatatttgttgtatgtgtacgtaaataactgtacctcattcagtacctacagagggaattaggacttcatctggcggtttttaaaaggcttatgatatagtactgccaaagtatgaacaaggccttctgagcctcacctcctcacacactagtgtgagcagcacagtgtaaggagaaatgagaatctctaccacagagatagtctgcgtctcagctcaatttgagaaaatagaaaggaacattggcccagtacattattggaaactgtttttgttcagcaaatacattgagtgcccactgcacgtcaggccctggaacccaaccatcttcccagctgatagaaggcccttcttttggctcttacctatcccctggcttccattctactctttttcttgccccagtggacttggacagggtctgtggactgggcttacagccgagtggggagcagaggcagtgacagatgcagcttcctactctgccacagtcgggagtttcctctttatgccctgtgtctgaaaagccgagagaccagaggtagttgccaggcaccatttctccccagtgcaccacgggcataaactattatttataaactttgccatgattaatatcaagaccaaaaatcaggtgtgtttttaagcaaactatgaggtacaaagcaatggactatgttgttcatttttttaaaatcagtctaaaaggccaaggtgaaggtgtttcaggctggcccagtcctttgtgtatggcagtggcatttcttcgtggaggagatagaccatgcaggggaaagagcatggggctttggcattcaaagatcaccgtacactaagtgctggctgtgaatctccatgagtctctgttttctcaactgtaaaatgggtctaaataacccttaccttgcagagtggtcgtgaagttttgaataattgtgcagagcagctaccaccatgcccagccactcctagggaatctctgttccatttttgacccagttggactctaaacttaagaggtggccgggcacggtggctcacacctgtaatcccagcactttgggaggccaaggcaggtggatcactggaagtcaggagttcaagaacagcctggccaacatggtgaaatcccgtctttactaaaaatacaaaaacttgctgggcatggtggctcatgcctataatcccagctactcaggaggctgaggcaggagaatggcttgaactgaggaggcggaggttgtagtgagccaagattgcgctacggcactccagcttgggtgacggagtaagactccatttcagtaaaaataaataaataaacttagaggcacacatgtggagattgttctcagggattgaattcctctggctagatgcttttttcagttcagcctgctaataggtaagtgcctccggaagaagatggatgttgggtgttgttactttctccttttcaaggacctgttgctgaaagtgcacccaataactccctgaagagtgacacacgtctgactgggggcatgagatatctggcaggccactcaggagaatggcatttccatgagaaatatgcccagtaacccttcagatgcctgaagtgttgtttctatcagcagtctggcccagctcttggcatgcaccccaaaccctgattttcttactaggaaggtttagaattcattttgcaagagttccaattttgtgacaccctagagagccttcagttatctcaaggaggtattctgaaattctgtaaaccagagtttgtcttaaaaaatagggagtgagattgaatccacgtcactcagcaaggaggtggggtgatgctactgcaaaagcttaccctccacatccactgttgtaaatggaaggattgaactaaatctggggctctttgaggtgaaagagataggagcagttgtctcagttagccttccgtctctcttatcgctcccaatgtgaccctttggagccatgtaaaagaagcctgctctatagtcaataggtagctctatagctatttgaaaatagctatcagagtgccccattattctctttgccaatttaaagttccctggtattttatatgagtggatctttattacctttagaaacctttggaagtcctccagataatcagtgatcagtgtgccttcttttttttttttttttttttttccgagacagggtctcctgctatcacccaggctggagtgcagtggcacaattttgactcactgcagccttcacctccccagctcaagcaatcctcccactgcagcctctcgagttgctgggactacaggcatgcatcaccacacccagataatttttttgtaatattttttgtagagatggggtttcaccacgttggccaggctggtctcaaactctggcctcaagtgatctgccaacctcagcctcccaaagtgctggaattacaggcatgagccaccaagcccagctagtgtgcttttattcacttactcagtcatccatttatttattctctccatctcaagaattttcactagattataagccgtggtggttaaaagcacaggtttcgcagtcatacagacctgactttgtcaagttactttttctaggagttggcctctatcaaatggagtttttaatacccacacccacaaatattttgaatctggagtgcttgtaaagaatttatactggctgggtgcggtggctcatgcctgtaatcccagcactttgggagtccgaggcaggagggtcccttgagcccaggaagctgtggttgtagggagctatgactgcgccactgcaccgcagtctggatgacagagcgagaccctatctaaaaaagaacttatgctaggttctggtacacagaaactactcagttgatgaaggctaaatttcctggctaagttagattgttagaacacaccagcatcatcttgttcctagtattaagagggtgggggaatgtaagattgaaatttgttgtctgtttcctagaaccatggttagaaggaggctttaaggtgattaggaatagcttctttgcagcttccatttctgttccttcacagcggtttatttggaagcctgttttattgaacagtgctgttagtttcaacaggcatattctgtaggatttgagattgttaaaaacttcaatgatagaagatggatgaatgtgatttaagtacagatgctctttggttattcagattgtatagctaaccttttaaactccaaatgtaaaacttttcgacttttaaccttttaaactttaaattaaaaaaaaataggaaacattttaagtggggagagcattgtttgaatcattgttatctggttgcaacaatgtgtgaaacagaggcactcagcccctcttccccaccccgcccctcctcccggagacacagtcttgctctgtcgcccaggctggagtgcaatggcacaatctcggctcactgcaacctctacctcctgggttcaagtgattctcccacctcagcctcctgagtagctgggattacaggcacttgccatcatgcccggctaatttttgtatttttgtagagacagggtttcactatgttggccaggctggtctcgaactcctgatctcaggtgatccgcccgccttgccctcccaaagtgctaggattacaggtgtgagccaccatacccggccagccctcttatttattattttgagacggggtcgcactttgtcacccaggctggagtgcagtggcacgatctcagctcactacagcctcgacctcctgggctcaggcgatcctcccacctcagcttcccaggtatctgggactataggtgtgcgctaccacgcccagctaattgtttttgtattttttgtagagatggggtttcaccatgttgcccaggctggtcttgaactcctgagctcaagcaatttgcccacctcagcctcccatagtgctaggattacaggcattagccaccatgcccagccttaaattctttatgttatacttcatataagtagaagatgctagagacacagtatagactcgttaaattatttcctgtaaatgtatatcatacatcgttaattggcatttccttacttctttggtaaaaaaagtctgaagtcagagcctgtttgcttcagtctataaggggagcaagcagcagccattcccccgaacctaggaggctatgccactactttatgaggagcaggtatctcacagtgagtggggacaggctttatggagtacatggttcttccctgagaccccagaatccattcacattatagcattctccatattgagtcaggtagcaggctgaatgaagattggattctcattgcctttggtttgtcatttgaagtaatctcacccagcagcccagaaatggaatgatcttgctctttccttgtgtacattatattctgatctgttctttttttttcttgctatttgtttgcacaggaagttctcaacgaatctcagactaaacaggaagtgatttttttcttatacaaaggggtactggtaggaacgaagatgggcaggagaaggagagggaataggtggcctgcggcctggcggttcgttgtttccttcagtggattttatgtaaaatccctaaatactttaggtttatgggctgtgcacatttctgagtaaatctgcttttctaaattggtttcatcaactggaaaatgtaactggattgctggagatacacctgggtctaatttaccttgatcctatttggttacttttcttttttagtagatattttaacaaaaggccaaaatttcaagtgtatttctttggctttaggaaatttatcatttgtttagagtaattttttctccatttaaggttcaaaataaaaagattgaatacttttgaggcagagtatctcagtattaatcatgttaatgagcataggctttggagacaaaccttcctggatttgaatccaagcagtcacttagtagttgtgtcatttaggcatgtgagagattttttccttggtaagattgagtgtcatcaggtttaaaagaaataatatttggcaggctgggcaacatagtgagaccctcatctctacagaaaatttaaaaattagcctgggtacatgcctgtggtcccagctttgggatgctgaggtaggaagatcacttgagcccaggaggtccaggctgcagtgagctgtggttgtgccactgtactccagcctgagcaacacagggagaccctgtctgaaaattataataataataataatatttggaacttagtctgtgcatagtaagttctcaagtggttgctgttgctgctgctactgctgctgctagtacttcttgaagaaggtgactagggaaaaatagacaaaaaaaatactttatttgtcttgtttgattagtcgactttaccttttcctaatgtggatgcaactgagaattaaccccaagctaatgtatcaaaggacattctcatttgggtctatcagccctagcagaatgcctgctctcttttctagaaagaggaaataatctgttttccatttcattttttttaaagattttagctatctttgagtatgtaacatctattatccttgtagggtgtttggaaaacttcctgtttactccagtgcatccctggtagaggatgtagataatcatcgtattgttattttattacataaacatggactgcttcttataaacatctttgttctaataatgtggtctcatactcaaggtgtgactttctggcatcctgtgtggtattcagaggccagaagatagaaaattaaaagtagtgagatgagccaagcgaatctttttaatccttcttgaaatcttttttttttttttttttgagtcttactctgtcatccaggctggaatacagtggcgcaatctcggctcacctcaatctccacctcctgggttcaagcaattctcctgcctcagcctcccaagtagctgggattacaggcgcccaccactacgcctggctaatttttgtgtttttagtagagacacggtttcaccatgttggccaagctggtctcaaactcctgacctgaggtgatccacccgcctcggcctcccaaagtgctgggaatacaggcatgagtcaccgtatccagccacttcttgacattctttctagcagtttttataccactgcttcccttctggaagccttactgatgtttaagttacatgttgatactcactttgtttttgtgcttccctttctctttcctggacagaaaccaaagcccaaaccccggccatccatcacaaaggcaacctgggagagtaactattttggggtgcccttaacaactgtcgtgactccagagaagccgatccccatttttattgaaagatgtattgagtacattgaagccacaggtaagagtattacctcatagcagtttataactttcactgtctacaggatgcttactggagggtcaagccatctggagattctggaatcagttgttgttgattgtgagatgctcttggagaaggagctgagcagtcccaacagttgtcagatgtgtagattctccatttgtgtgcagttttgaggctgtcgttgggcatttattaggccttggcctacgaaggagctgttctgtgctcaaggtggcagctatggctgcttgggcgctttctctgtgctacctcacccaccagagcatcagcactctgtcagttgcctgcccgcctgtgttccctgcagatctgtgaactccttgagggttgtgctatcattgtgtcctcagtactatagtggatacataatacattttggtttagtaaaattaatacagccctcagcattgttcggatgcctgagacccatgtattgataggatttttttctgaggtaagaaaatgattaggatgtttgggatatcttctggttatgccgctcctctgacaacttgatgctatcacaaaggtagactgtcttgggaaatttttttgcattgttcttgaaataattaagttttacttgtgttgaaaccatttgctttattcatttgagctctcatgtgtccctttggccttccagtttcactaaggtgggttcttgagcattcggagttgggctcaggaacacaggcttaaactaatttgaaactaaggtagggattacagccttccaatctgttctttctaactctgatattatctacagtggtattaagtattgtgtggtgtggacagcctactaggctctgctgataatttcagcagcatcgtgtgaagctgagtgacagtgttcatatttacttaggatgttgtaaagcagggaagatggctttatttattattttatttttatttttatttttattttttgaaatagagtctcactctgttgcccaggctggagtgcagtgacacgatctcaactcactgcaacctccgcctcccaggttcaagcgattctcctgcttcagcctctgagtagctgggattacaggcgcccgccatgacgcccaactaatttttgtatttttagtagagacgggtttttgccatgttggccaggctgttcttgaactcctgacctcaggtgatctgcccgcctcggcctcccaaagtgctgggattacaggcatgagttacggtgcccagccgaagatagcattttttttttttttgagatggagtctctctctgttgccaagctggagtgcagtggcatgatcttggctcactgcaacctctgcctcccaggttcaagtgattctcctgcctcagcctcctgagtagctgggattacaggtgcacaccaccatgcccggctaatttttgtatttttaatagagatagggtttcaccacattggtcaggctgtctcaaactcctgacctcgtgatccgcccacctcagcctgccaaagtgctgggattacaggcatgagccactgcgcctggcctgaagatagtttttaagttggagcccaccaaagactttgtatttatttcctaggttttctgtggaaaccagagaaataattccccccaggcttgaatctcagtaataagcacttggcataatcattacagatctatagctttgtttagtccattctgtacccaaagcggtttctcattgtccatcttttttttttcctgctgtagacacaggggtctcacttattgcccaggctagtctcacaatcctagcttcaaatgatcctcctaccttggcctcctaaagtcctgggattacaggcgtgagctaccatgcctggcttcagtgtccatctttttgacactcgttttatattaatttcctcctttatctgtctctataaaatgtttgaaagttgcaggtgtgatatgcacctttacatttatttatttatttatttatttatttatttatttatttattatttaatttttttagatggagtctaactctgtcacccaggctggagtgcagtggcacgatctagactcactgcaacctctgcctcctgggttcaagcaatcctcccacctcaggctcctgagtagctaggattaccggcatgcaccaccacacctggctaattttttttgtatttttagtagagatggagtttcaccatgttggccaggctcgtctcaaactcctgacctcaagcaatccacccgccttggcctcccaaagtgctgggattacaggcgtgagccaccatgcccggcctgcacctttacttttaaatacttcagtgggtatttcccaaaaacattctcttatagaaccactgtgcatttatcaaaattaggaaatcaacattgatctagtactaatctgtctgtaatctaatctatagacattctcatttcatcagttttcccactaccttcctttatagcaacagacaaaacactgttttggtccaggaccttatcctggaccacacgttacatttagtggtcaaatctggcccagcacagtggctcacgactgtagtcccagcactttgggaggccgaggcaagcagatcatgaggtcaagagatcgagaccatcctggccaacatggtgaaaccccgtctctactaaaaatacaaaaaattaggccggggcggtggctcacgcttgtagttccagtactttgagaggctgaggcggaagatcaggaattcgataccagcctgaccaacatggagaaacccagtctctactaaaaatataaaattagccaggcttggtggtgcatgcctgtaatcctagctagtcgggaggctgaagcaggagaatcgcttgaacctgggaggcggaggttgcggtgagccaagatcgcaccattgcactccagcctggccaacaagagcaaaactgtgtctcaaaaaaaaaaaaaaaaaaattagctgggcatggtggcacgcacctgtagtcccagctactcgggaagctgaggcaggagaatcgtttgaacccagaaggcagtggttggaatgagccgagatcacgccactgcactccagcctggcgacagagctagactccatctcaaaaaccaaaaaaccaaaaaaataaaatcaccaatcagttattttgtagggtgttcctcagcttagctttgttttcccttttttttttttttttaattttttgtatttttggtagagatggggtttctgtgtttcccaggctggtctcaaactcctgagctcaagctatccacaagcctcgacctcccaaagtgctggcattacaggcgtgagccactgtgcccggccttggctttgttttagttttttggatatttcatcgtgatcaagttctgggtttgcacttctggcagataccacagggcagcaatgcctttgctctgtcccctccacttcatctctgctgcccaccatcacccaccttctcagtccagtctatgggtatgacagtttatctgctgaaaacccatccttgcttctttgttgcctaccagatgcaggtcgcactcataatcctccttcccggactcaggaacagcaagactgttactatgccattgtcccctgccctccttcccaccctccttttttttccctctcccactcccttctttcacccctttctttctgttttatgctgcttcaagtattaattttaaaattgttctacaagaatgcgatttatcagaaggatgtgaaccaagcagaatttcttagtatttctttgccttagggcattccccttgtgtggtttaaaatttgtcccccattcctttttgcctgtggaacttatccttattcttcaagagactcctactcctaatagcactttgaatttaacctccctggtagttcttctcagccaaatttcaccttcctgaaaacaggattctctgttctccttgtctccctagagcccgatacagcatatacattaattgattattgtaaattagccaggcatggtggcacgcatctgtggtcccagctaccctggaggccgaggtgggagaattgcttgaggccaaaggttcaaggctgcaagtgagctgtgatcataccactgcactccagcctgggcaacagagcgagaccctgtctcttaaaaaacaaaagagagagagaaagagacagggtctcgctctgttgcccagtctggagtgcagtggtgcagtcatagctcacttgcagcctcacctttctggcctcaagcctcttgagtaactgggactacaggcatgtgccaccatgtctggctaatttttgtattttttgtggagacaaagtctcactatgttgcccaggcaggtctcaaacacctggccttaagccatcctcccaccttggcctcccaaagtgctgggattataagcatgtgccactggacccagccagagaccctgtctctttaaaaaaaaaaaaaaaaaaaaaaaagatagattgaatgagtggttttcaatctggaacaccttaattccattttcgtctttcttcaagaaaaaaatgaccatatatttccccttgttggcattagtttgtacttttatggaatttcagaagaaaaattaaacctggtatctgtgagcttagtgtgcattggagggatgtctttgtgtacccttatttcctaagaaaactttttctcccttttataaaattaaagcaagttcattgtagaaattggacaaatggcaagaactgtgaagaggaactcaaagattcgtgatctgctacttagtgaaaaccaccgttaatgatttgagatgtttcttgtagtcttatttctctgcatatacacatatatttattttcacataattcagagtatgaggtaagctagctttcaacatttttttaacatagccctcttagatgaggcagaagaggccgggtgcagtggctcacacctgtaatcccagcactttgggaggccgaggtgggtgatcacttgatgtcaggagttccagaccagcctgaccaacatggcaaaaccccatccatctctactaaaaatacaaaaattagctgggcttggtggtacatgcctgtaatcccagctattcgggaggctgaggtgggagaattacttgaacccacgaggcggaggttgcagtgagccgagatcgcaccactgcactccagcctgggcgacaaagtaagactctgtctccaaataaataaataaataaagcatgcatgcatgccaggcatagtggtgtgcacctgtgatcccagctatttgggaggctgaagcaggaggattgtttgagcccaggagttccaaggctgcactgagctctgatcgcaccactgcaatccagcctgggcaacagagcaagaccctgtctcagaaaaaaaaaaaaaaaaaaaaggaaaagaaaaaattaccattaattcagtagtatcatttcacatacagttcattttaaaatttattcatttgacgtaaaactatatgttatagctgagctttttgtactaggattcaatcaatagtcacactgcacttggctttgcctctttaggcccttgccgtccagaacagtcctctctggcttgttttaataatgtgattttttttttttttttaaagagacagagtctcactctgtcactgaggctggagtacaatggtgcagtcgtagctcacggcagcctctaactcctaggctcaagtgatccttcctccttttcttcctgagtgctacaggcatgctccaccacactcagccaatgatgaccttttttgaaaagcctagtcagttgtcttgcagaatgtcctcttcatgtaatgtgctctttggacctcttcagcatcctcagctgccttccaggaccaagtgtggcctctgactgagcagggggttgagcaccctgcaggtggtggacgcgggactgctgcctccctttctggacagggcacacgtatgaattgggcttacgggctccatagggttgtattgaataattgaacgaattgtgagctagtgttttccccaactttgactgacagatagtgggcttgcactttgcttagggaaagctggtgctgccacctgccctctcaccccatctctctctcttgctcatggttggaatggccatatgaccacacagtttccatgtagtattccaggcagggagtcctagctgattagagatgacattcccaatgaaacttgtttgccaggcctggtcaaagcagtccaaagtcagaagtctttgtgtccctgtttttgtgtccatttcatgtaccttggcactttaaggcttgtcctgcaaaataaaacattgcatcatcacttgtgaaggcagagcttgggagtttgcactgctaagatgaggataggaaagaaatttatgccgcagggcctttgatgctgcccactcacctgtctgcacagccagggcacggccagcgggagtggagaagatgagcgagaccaaaaccttgccgtggggaggagggtggcatagccattgataaatcgggacttgaactatcccatcactctaaaaatattttttatctgattacaaaagtaatagatggccaggcatgatggctcatgcctgtaatcccagcactttgagacagcaaggcaggagtagcattcaagcccattagtttaagaccaaccctggcaacatggtaaaatcctgtctctaccaaaaatacaaaaattagccatacatgatggtccatgcctgtagtcccagctactcagaggctgaggtaggaggatcgcttgagcccagaaggttgaggttacagtaagctgagatcatgccactgcactccagcatgggcgacagagtaagaccctgtctcaaaaaaaaaaaaaaaaaagtaatatacttgctcactgtaaaacaaattaatcattatagatatgtaggacagaaagtaaaaattctttataatcccagtctccaggagtcatctcattaatgtacagattatgcttcctgctaatgctagtcccccaaaacattgaagtctgagtatgagatcatctctgtgctgttccgcagctcattgtctgttttagcagaacatgatatcttgggcgtcacttctgaattccacctccaggccaattggattttggtttttgatgtgaggagaggatgcaagagctggtatgagaggagggtctctggaagtgtgggaagagaagccttgtttgcagaggtggcacgtggcagtttcctgtgactggcatctcccagccccttagtttgtgagtaaagtgccaaatccttctaaacacagatcacaagaaaaaagatcatcactttcttacctcaatttactgctcctgatgtttacaagcagggcgctgtgttgagactcctccccgatattttcccttctcaggttagctcctacattgtgagggaaattggttctgatttgcacctgtcttctttcctgagctttctgaccagttcatttacccttgttcatacttctgaaaatcagaatgtggtcaagaaatgaccagagagtagaacagctttcagattgatctgcagatgcttttaggacagcccagccccggacaccctctgtgcttgctgtgctaataggatattcgactttcactctctcagctccggttacatggaaaggctggatgagggcatgtcactgccacagctgctctgggaccgccactgagagtgggaaggaggcggggttgagggggagcttaggaggcggggttgagggggagcttaagagtcagactaactttctatttctagcttgaatgctttttttcctccagttttcatctttgtggaaaattggttgaggcaatggagtcactgctcccttctgcagcagtgtggctcctaatgacagagaacattggccaagctcatctgagctctctgatgcacagcaggaagtagaattattcaattcagtgtacctctctggaatggggcaagaggttacttttagagctggctcacaatcctcctgagaataatttctcagggtaaagtacactcttgatagctcatggtggtcacaagactgaggttttaaatcctgggtctcagggccaaatttgagtcaagccttcctaggattcaagaaatctgacagcataggaaccccctgaggcagcttccaagtgtcgtcacacctgcccacccgggacggtctcagcgttctggagacagaatcctagtgccccacttgccttggctctgctgtgtgtgttcccgggtccccagcctctcctcagcctcacttgctatttaactagaaatagcattctctacgcatgctttctttgaataatatgtgaggccagacttcgttccctgtttctgtgatttttaacctctgcttttggcagtgtgagaggaggcatggcaacagtgaggaaatgatttccctggccccagtcctttcttaattggtttgcttactgagatgaccaaccctccacatctctagccagtgctgtagaggccgagaagaggaattgtgcctagggagaaacagttttactggggcagaaggcacccatcttctctcttgagttatgatgtattcaaactattctatataaataactgccaggacacagttttgttagtgcagctgactttcagttagtccctctggaatgaaaagctgtctgaagtcaaggaaggcctggcaggtgttccctcaccccgctttctgttccatacatgtttcttgagcgttgatatggcctaggcctggctctgggcactccgtcatatatgatcccataagagatggtgttttgctctaagaacatgggtgtggtaggaagctagcccttgggaggggtcagggtacatctcagtcctctgtcactgtggggaggacctcagtgtcagtaaagttcagggttagtctggctggaaaaaaggtggcagcattgatattcccttccctgtatataaaaccttgagaggagtcctgcataaaatccggtggcagaacccaggctctgcctctcagggcagcacctacctgtcatagtaatttagctgaagttcacatttattttctttttcttattttttactttttttcagaaatggggttaccctgtcacccaggctgcagtgcagtggtgcaatcacagctcactgcagccttgaactcctgggttcaagcgatcctcccgcctcagcctcccaagtagctgggactacagaagtatgccaccatgcctggcttggtttttttgttttgttttgttttgtttttgtttttgttttgtgtgtgtgtgtgtgtgtgtttgagatggggtcttgctgtgttgcccaggctggtctctaactcctgacctcaagcgatcctcccttctcagcctccctagtctctgggattgcaggcatgagctcctaagcccagcttcacatttattttcaaaagctctttgctggagggtctgcagagccccaccttggggtatcattgcctgcacttaggagactgtaatgtaaatggtgccttctttatttgccttccaggggcacttccttgatggacacataatcaggtcaactttgacctcttgtccctggttgagtggggaaatcccagagagaggatcacgtggttgtaggaagacaaacttccagataactctttaatagctttaagcttaattcacttaccatcttttttgtgggggtggatggcagatcttgttcattaaatgagtatttattgactttatattaattaagcacctactatatgctaggcactgttttgaactcagatagcccccatgtgtctgggcgtgggggagatagatataatcacatgaatgcataattcttcagacaaggaatgttattggattttaaaattattggggaataaaataacacacaggacccagtgttggtgaggatatggagcaattagaatcctcacattgccgaagggagtgtaaaagggcagagtcactttggaaaactctttggcagtttattaaaaagttaaatagatccttttatagttcataagtgtgatgatggggtgtacagggaaaaactccaaccccatttttcctctagcctcacaccaccacaacaatcaccaacacagaagacttatgtgaccaaatgtgtggggtgctttccccacacaccaggcaccagacaccagctgggtgtcctccggttcaattccaaaaccgtctacctagagatagtgtcagatcctgcaggttgggggctcagcacccaagactgccctccacatccccagacaccagttgcaagtgcaggcctctggaacttctgactgaccggcttcaagctggggttcccatgaccccctctttgggttcagttaatttctggagcagttcacagaacttagggaaacacttgcttatatttactggtttattataaagaatattacatgggatacagatgaagagatgtgggtagggcgaggtacaggggaaggtcgtgcagcttccatgccctccctgggcaccaggaacctccagtgttcagttatctggaagctctctgaaccctgtcctcttgggttttatggaagttttatgacatcagcattccttcccccagggtatagggtgggaccctcgcaggggagggtcttaagactcacagttggaaggtgggggaagattagagtcctgccttgtggcaggtgaaaggaggacaggagagagattgtgtttcccgatacctgcccttggggcctaacacacccaacattataacaaaaaactataacaagggctgtgggagttaggaaacaagaactgtagacaaaaacctatgtatcatatcacattgggttttcatgctcatgtgtgagaagtgcctctttcaaaccttgttctgacacattatcttacatgcaaggaaaaaaagctaaacatacacttaccatcccacttctaggtatttgcccaagaaaaatgaaaacatacgttcacactaagacttgtactcagctgtttctagcagctttgttcatgacagccccaaactaggagccacccagatgtccaccaccaggtgaatagaccagtaggtccatccatctgatggaatacttctcattcattaaagggaataagtacgctgtgtgtaacaacagtgggatctcaaaattatgcttctgagagtgatggaagccagacacacaagaccatgaaccgcggttccctttctagaaagttctggaaaatgcacactaacctactaatgtgaagccaaccagtggtagcctggaagctgggatggcaagaagaatcgattgcaaagagacaatagaaaacttttgtgggtggtggaagtattccatattttaattgtgatcatttcactcatgtattacatatttcaaaattatcgggccaggcgcggtggctcacgcctgtaatcccaaaactttgggaggccgaggcaggtggatcacaaggtcaggagatcaagaccatcctggctaacacagtgaaaccccgtccttactaaaaatacaaaaaattagccaggagtggtggcgggcgcttgtagtcccagctactcgggaggctgaggtagaagaatggcgtgaacccgggaggcggagcttgtagccagccaagatcgtgccactgcactccagcctgggcaacagagcaagactgcgtctcaaaaaaaaaaaaaaaattatcagatggtatactttaaatggatacagtttactgtatataaattatacctcaataaagttgatttttaaaaacaaaacaaaaaagaagtcattggggaacagttttgaagaaacttgctgtttatataatttcaaaatatcatctagcgcattaactactagttacaaagggggaccacacctttataatttaaagatctgggtattaccaccttaccaaagtagttacactcagcatctctactggatgaacccgacattgtgttgtgcctcctggccaaaaatatttcacctgaattttatcagggagaagcaatcagacaaacccagaatatgatacatttataaaacaagtggcctgaactcaacaaaaaaggggtctcatgtgacttctccatttgtaccgtgaactcgttttccactagcctagtcagatgtgaaacccatgaaacttggagtcacagctgacaccccacctttgccaggcaggagtagctggccaaccataggcaagacacctaaactttctaagcctcatttttctgttccttcaaattgggaattaaaataacaactctttcaaagggagtttttgacaattaaatcctgtttgtaatgttcttggagtagtgcctggcacatagtgatcattcggtcaatgttagccattattttggtagctcctgtcactgacctgctgtggtgtggaaatcccaatgggacgtttccccaaaacagtaatggatgagactgggcagtgtctgtaggcagtttttaaaacttctccttgaaatataacacacactaagaaaagcacacccatctgggcactggttgcataggtcaggaaaacagaagacggccacccccaaaggcccctcgtcatttcatccctcaacaaaggataaccagtatcctggcatccaatggtatggaatacttttgcctgcttttgtattttaaaaatggaatcataccaaatgcacatttttgtacctggcttctttcacttaacattatgagattcagctacatgattaaatccgtaaattcatccatggttgtgtatgattgtaaatggttcgttctcattgctatgtagactttcatcatgtgaatattccacaatttctttctttcttccactcttcctggacatttgggtactttccagtttggggcagttatgaatagtgctgctgtgaacattcctgtacatgaattttggtgtacatatgtgtgcacttacattggtgtgtatacctagaagggaggcagttttgaataattcagtttagcatgttggacacaatgatttaaatgatgtctccaagcacgtatcagtccctgaaggggtaataatctctgaggctgatggcagaggcagtcaggggatctctctgtgttactgagcttgtggtggtgtgtttttgtatcttcggggctgaaggagtgattctggcagggtgagtgtgggttccccaaagctatcaccacattcttgccccagctggatcgttgccatctactgaggcctggctggccctccattacctcgctgtggctctctctgtggttttgcattgagtctgtggtttgcacacatcttgatgaccccatggtttttacctgccgggccatcataggacagtgctctctgatgaaatgctggccatttgtggcacagagaagtaggtgtcaacaagaacacctagcagtgagacaagtcttcaccaagactccaaaatgaaaggttcagccttgtgggcagtttgtgaggagaggaaagagagcaagtcaagaaatgaggctcttaccccagtccctttacagggcgaatgtggagcccggcagctgtggaccagtttgtctccatcatttgcaggtcagaggttaccctcagctcctcagctgcaaatggaagccctctatcaaacggcctttgccagaatacttaggctgtgaccttccccctatgcagctcatttgcctgggtaaatgagtagagtgctttctgcgtggcagatttaaatttcaccactaattgatgctagcgtcttcaggggaaaatgcttgccattagatcacaggcctttgggagacagcctcataacaaatacatccaggacagggggcggggatggggaaagtacagaatgcagctgtaccgaaaggaactgtgggacgtgcccagagaaaccaactgagtacttttgaggcatgcccttggggactgcgcatgtgcatggttgtgccatgtgtgttttgatggcctttttttttcttgctagtgtatagtatgtacaggacaaacttggagccaaactgtctggaatcaaatcccagctctgctgcttacaagcaaatatttaacttctccattgttagtttccttgaccataaaatggggataatgatggtactttgagtcatgagatgattcagtatgttagagacctcataacagtacctggcaggttgtaagtagtcaatttgctactgttgttggtgttattattgaaatgatctaagatgcatcttccactctaggcaggcccctgtgctggccatccccttcatttgccaagtcccccatgcagaggctcctggtcttcaagacccagtatgggtgtctccccagggagagtagcccacgtgacttgttctcccttctgcattcctcatgtcatagcagggcgggtcagagcatggactttggaattggtacaattggtttaaaatcccaactgaagggggatgggggattaagagaggatgcttaaatggatataaaaatgcagttagaaggaataagttctagtgtttgatagcccagtaggatgactatagttaacagtaatttattgtatatttcaaaataactgcaagatgtgaaatgttgccaacacaaagaaacgatatatatttgaggtgatggatatcctaatcatcctgatttgatcattacacattgtatccttgtatcaaaatatcacatgtatcctgtaaataggtataattatgtatccatttttaaaatacattatttttagaatagaatattaaaactatgaatactcaaagttctgaatgagtgtgtcatttattacattaattgtgctgttcaatttaaatttatgatcctccaaataaattgtcaaaatgatttgaaagcaggaactattatttatcttatgaaaagtaagccccataactaaaaaagttcctgcaaaataatctgtaattgtgtttatattacatgaatgattcgctgtttctccaaaagagcatttaagaagtcagtaattctcaaatgtgcaaagtatttccacgtgcttaacaagaaaactatctaaaacgaaacaaacaaaaatcccagctctgccacttggctaaactctttcacattgctgagcctctgttcttcctctgcaaaatgcagctaataataatgcccaccttattaggactatgaggattgtttttgttttgttgtgttgtgttttgttttgtttgagacagggtctccctctgttgcccaggttggagtgcagtggtgcgatctcagctcgcagcgtgcagcctcgacctcctgggtctcaggtgatcctcctaattcagcctccagagtagctgggaccacaggtgtgtgccaccacgcccagcagtttttgtattttttgtagagatggggattcgccgtgttgcccaggctggtcttgaactcatggccttgagtgatctgcccaccttgagtgatcccagagtgctgggattacaggcatgagccaccatgcctggccctacatcactctttaagtggtcctttgtgcatttatttctctgcctggctccagagagctggaggactgtgaagacactccttttttcgcatattcagcaagtatatattgagcatcttatactatgtgccatgcactgtttaagatgctggtgatacagcattggaccagacagacaaaatcctcaccctcgtgtggcatacattataacccggggggagacagataataagaagtaaaatgtaaagaaccttagtgattagtgtttgggaaggaaaaaaatgaagcaggaaaggtggggtatgaaatgtccggggtgaacattaacattttagataaggagggctggggaagagtggcttttgagaaggtcctgaaggaaatgggggagagaaccatgccatttcctggggaagaacctttcagacagagagaacagcaagtgcaaacgtccagaggccaggacattcctgggaaagagcttggtttttactctgagtgaggtaagaagccattgaggggtttggagtggagggacaggacttggcctttgcttaataaaataactggctgctctgtagagaacagtcctcgcccttgaggacttgtgtgttcttgttctagctgcctttctgcaaatctttctccattctgctattcctttctctggatgtatacccagtcccccatattgccggcatgggttcaaccaaacccctccttcatacttgaaagggtagagtagcacactccagtgtgggggcagcccaggttggagcccagctggaagaattcagcacagtaagcagacgggtcacttcccgtccaaccctgtctttccaagcccatcttccttcacactggactccttagcaccttcacacggtgtcgtgcctctgcgtcgttgttaaacactgttcctgctgcctaatatgttgtttcctctcccatctaacacattcccatcctttccgaagccttcacactctagacatgcctcgattatagtagctgtccccttgtgttagggatactgtttctgtctgtcactccttagaagaagagacaggagggagcttgctctcctccctctgccatgtgaggacacgagaaggcagctgtctgtatgtaagccagcaggagggccctgccagaaaccaaataggctggcccctcgatcttggacttcccagccctcagaaccatgagaaaaagagagctattgttgaagccacccagtctgtggtattttgttatggcaacccaagcagctaagacagatggcaaggtgaccaactcaggcatcagaacacctgagagccttaaggcaggggccccttctttcctgattcatgtgtccccatgggacctggctctccagagtcctccatcagggatctttgtgtccacatgaccagaacacagcaattgggtcagcagaaatgggaattgaggcaactgaaagtcagaagggctgagacaggtggacgaagacgtggacaaatgccacttgagagccgtggtctgaagagatgagctcacgcctttgtgtagtgcccggctcccaggtggtttactgtttgaaatgtaagctgactgggtatcagacaactgaatcccactttttcaaacaaagatggtgcaaggccttgtgatttcaccccagtttgcgttctttcactcttggctggcatcctttggctatttaaattcgtagcctcccaacagtttttaaaaaacaaacaaactcacacaatttatcttttcatgtaagctgcaatttggttgaaacaagacctttctagtacatagtccaaagctcctgataactgaaactacaatcagtgtttctgttctgtgatctgttttttgttttaaaagccacaacagaaaaccttttcttctgttacggctgtcaggagccgtttgggcttaatcaataatgaggtgtttcacttcctggggctgggctatctgtggagagcacttacttctccgtaacccatgaagccagtgaaggaccctgaatctgggtaaattcaaaattcttctgagccttggatagtcttaggcatagttctggcagggtctgacttgaaaaagtaggttgtgtatttattattgtcgtttcaatatcactaacacgaggtgaagaagaagaagaaggcaaaagacccagcctgagcagaactcaatgtaacagtccttgattctaagccgcccccgtccatgtgatacaactcctagcgggggagggatagtggggcattatattaagtataggtattaatgataagttcgtctagtttggaaaacttttaaatgggcagagatgaacataatcagatggcaaggatgtggtagtagctgtttgaataacaataatgatgaggatagctaacattgataagcattatttcatgtcaccctctccgtgacagacagagcctgagaggagtcgccattgcccccacacagccagcctttcagcagccttcttggcagcagctatgtcagaccaacagtaccttcctaattttagcctcacaaaattcatttatgtttcatatataccttattcacatagcatgaaggtaatttcatacgatgttttttgttttgttttgtgacagggtttctttccatcacccgggctggagtgcagtatttcatacttcctgtatttgtggcaggaagctttatgctttatcatcagagtgatctttgaagggaaggacttactcagcatttaaataacacaagctagattacagagcaaccctttaaaccatttaagaaaaaaatgatttcctttttaaaaaatggtaattgctgtatgattgtcaaatttttcctcttgaaagtattttttaagtaaaaatgagcctgcatactacacccatgtatgaccatcatataacaagacagggtaaatgcaggtcacgcatccctaatctgaaatccaaaatgccccaaatctgaacatttttcagcaccaacatgattccccacctgaccccatgtggtcacagtcaaaactttgtttcatgcacgaggccagggcacagtggctcatgcctgtaatctcaacacttagagagaccagtgcgggcagatcacttgagcccaggagtttgagaccagcatgggcaagatggagaaacgccatctctactaaaaatacaaaaattagccacgtgtggtggcgtgcacctgtagtcccagctacttgggaggctaaggtgagagaatcacttgagcctgggaggcagaggccacagtaagctgagattgcaccattgcactgcaacctgggtgatagagcaagaccctgtctcaaaaaaaaaatttatgaaattaccttctatgctgtgtgtataaggtatatgtgaaacataataaattttgtgtttaggtttgggtcccatccccaagatatctttttttttttttttttggagagggagtctcactctgtcacccaggctggagtgcaatggcacggtctcagctcattgcaacctccgcctcccatgttcaagcaattctcctgcctcggcctcccaaagtgctgggattacaggcgtgagcaaccacacccaaccgcatcctcaagatacctcattacttatatgcaaatattccaaattctgaaacacttctggtcccaactattttggttgagggctgctcagactgtaatacatcagtgtgattaagagcagccacatggagtcagtctctttggatgccaggcctagctctgctacccagtagctgtgtgatctggggcaagtgacttaccctgtctaagcctcagtttcctcatctgttaaacaggcatgatgatgataagcagtattttatgtatgcatatatcttcctacgtttaaccagtggtttctaaacatttgaggcatatgtatagctctcatcttactaattacaaattatcattagctgttcttaaagcagactttttttttttttttttttttgagacggagtctcgctctgtcgcccagggtggagcacagtggtgccatctctcggctcactgcaacctccgcctcccgggttcacaccattctcctgtctcagcctcctgagtagctgggactacaggcacacaccaccacgcccaactaattttttgtatttttaatagagacggggtttcaccatgttagccagaatggtctcaaactcctgacctcgtgatccacccgcctcggcctcccaaagtgctgggattacaggcgtgagccactgcgcccggccaaagcagactttctaacactgctattcaaatggtaccatccttcatcatttttaaaaagtgtgatttaaactgttaagtagggctgggcacagtgaccatcccagtgcttctggaggccgaggcaggaggatcactagagcccaggagtttgagaccagcctgagcaatatagggaaaccctgcctgtacaaaaaataaaaaatttgccaggcatggtagtatgtgcctgcagtcccagctacttgggaggctaaggtaggaagatcacttgagcctgggagctcaaggcttcagtgagctgcgatcacgctactgcattccagaccggcaatagagttaaaccctatctcaaaaataaataaataactaaactgttaaatgtgtggcttagatgatttattcctctaaataggatgaataaatttgtgagattgggcacagtaactattttggtacagtggcaaggtgattggtgctggcatcagaacacacctgactgttagttcaggatctgtgcttctcgcattcgtgcaatgaggatgtttaatgagcctctccagcaggccagaagataatgcatagggcatggtctctgctattaggagttaggaaatgagaatgggggaataggtatagaaggagggagatttcttatgttcaaaatactgtgagaacactgaggagggagctggagtgcagtggtgcgatcatagctcactgcagcctgaaacacctgggtttaagcgatcctcctgcctcagcctcttgagtagctgggactacaggcccaagccatcatgcctggccaccatcttaatcatttttaagtgcatggtttaaggccaggcacggtggcccaagcctgtaatcccagcactttgggaggccgaggcgggcggatcacgaggtcaggagatcgagaccatcctggcttacacggtgaaaccccgtctctactaaaaatacaaaacaattagccgggcatggtggcgggcgcctgtagtcccagctactccggaggctgaggcaggagaatggcgtcaacccaggaggcggagcttggcagtgagccgagatcgcaccactgcactccagcctgggcgacagagcaagactccgtctcaaaaaaaaaaaaaaaaagtgtatggtttagtgtgtgccagatcctttttaaattatttctctttgaagattccttcctagtctaacaaatttgtagaaaactactatgggaggagggcctagcttagcaggagttttccttaaatattttatgtgtggatgacactgcgaggctttttcctcagacatctggaactggccatcggagagctgctccaggcagttgctctctgttgctctacctcgttgattgaccgcttcctgcacattggacctgtatgtatgatcctgcacaccagatgggatctgaggaaggctcagtcaggagtccctgaaccagttcccactgtttgaaacaatggttttgcaccctggtagtgaagcatttgcttttgagaactgcaattgcatgccttctctgacatctgtaacaacaggcattctctttcatcactttcccacgccctcatttgacctttacagcatttggccgtttttactcatatattggggattgaggtcacagatgtctccagttttgtcaaataggtgatatttctgtttctcattctcctggttgcttttgtgtgattctccagaggaaaaagggtaaaatctttattctgctgtttttaaacgaagtacagttaagtaaaataaatttagcattctggaaaatctccttttttaaaaaaaaatttatttatttatttgagacaaggttttacttcactgcccagactagagtgcagtggcacaatctcacagctcactgcaaccttgacttcctgggctcgggtgattctcccaggtaggggctacaggcatgcaccaccacacctggctacttttttgtattttttgtaggatggggttttgccatgttgccaggctggtctcaaactcctgtgctcaagtgattcggcctcccaaagtgctgggattacaggtgtgagccaccacacctagccaaaaatctcctttttttatttatttttattttattttattatttttatttttatttttttgagacaagagtttcactcttgtcacccaggctggagtgcaatgacaggatctctgctcacttgcaaccttggcctcctgggttcaagcaattctcctccttcagcctcccaagtagctgggattacaggcacccgctactacgcccagctgatttttgtatttttagtaaagacagggtttcaccatgttggccaggctggtctcaaactcctgacctcgggtgatccacccgcctcagcctcccaaagtgctgggattacaggcgtgagccactgcacccacccaaaaacctccttttttaaatggtctttatattttgtctactgatgatgacttcctcactaccattgttttagaaactgctccttttgtgccatttaaaggtaactcgaagccaggtgcgagtgtggtggctccagcctgtaatcccagcatgctgggaggcagaggggctagaggatcgcttgagcctaggagttcgagaccagcctgggcaacatagcaagaccttgcctctacaaaaaaaattttttttttttttttagttagccatgcattgtggcacatgtctatagtcccagctactcaggaggctaaggtgggaggattgcttgatcccaggaattcaaggttagagtgagctatgattgcaccactgtactccagcctgggcaacagagcaagacctgtctcacaaaaaaaaaaaaaaaaagaaagaaagaaaaaagtaacccgatcttgttgaggaatgtgtgcttatgcccttttccgccttctctccattagccctggctgtttctgtctgcctgtaattttattagcatttcagtcagatctgtcattaggtacccatcttcttgggtatacgtatcactctgctaagaaacaaaaggaatacatgtctcctccatgactaggcagtgggtgccacaggagccaatgtagaccaatatagtcattcaggcaggaagcttatgtatgagacggtaggtgatagacccctagattcctgtggcttcctcaggtcttttgtatatgaagaatttcataggttttcattctttggtctacatgcagagaagagagtttcttattagagaacagattggagaaaaaaatagggcttttactgtttattccacgtatttctgtattgtgtgaaaagtaatttagcaatgaacacgtattttgttaaaaaaaattgtagaatcgttagaagtaaaaagtaaagtcattttctcattctcaaagttacctgctattaagagtttaaattgtaccttccagagctttctgtatatgtgtctacacataatagatataatgtgctgggctgctttttatacagatggagccatgctgaatgtgctgttctatgctttgctttttcccacctaaaaatgtattgcatacattttcctataatgatgggcataaatcagcctttgaaaaacttgactggagagtatttctttggcttttttttttttttttcagagacgaagtctcactcctgtcccctaggctggagtgcagtggcgcaatctcggctcactgcaacctccacctcccgagttcaagcgattctcctgccccagcctcctgagtagctgggattaccggcgcctgccaccacgcccagctaatttttgtatttttagtagagatggggtttcaccatgttggccaggctggtctcgaactcctgacctcaggtgatccgcccgcctcagcctcccaaagtgctgggattacaggcatgagctgccgcgcccagccaactgtataataatttgtttaatcagtctcctgttaaaagacatcatctcagtcttttgttaatatagataatactgcattggctatctatacatgtgtagacacatgtatacacacacatacatgtgcatgcaaatacatctataggatagatacctcagaatggaataggcagatggaaggataggtacattttatattttaaacaatattgccaaaatgctctccagtatagcacctccatcagctgtatattagggtagtggtaaaatggtaatatgttagaattgcagctgccttacagtcatccagtccacctctccacaacatgggtgaatctcatggacgcgttgaataaaagaagccagaaataaaagaatgtatactgtatattttatttctataaagtagaaaaccagaaaacctacccatgctattagaaatcaggatagtggccaggtgcggtggctcatgcctgtaatcccagaactttaggaggccgaggcaggtggatcacctgaggtcaggagttcaagaccagcctggctaatatggtgaaaccccatctctactaaaaatacaaaaattagccgggcgtggtggcgcacacctgtagtcccaactactcgggaggctgaggcaggagaattgcttgaatcggggaggcagaagttgcagtgagccgagattgcgccactgccctccagcctgtgtgacagagtgagatcctgcctcaaaaaagagagagagaaagaaagaaaaagagagaaagagaaagagagaaaggaaggaaggaagggaagggaaggaaaggattgggatagtggatatccttggggagggagtagaggctggtagagggcacaaaaggcttctggaatgctgggatgttttgtgtcttgatctgtgggtgctgtttacacaagtgtggtcattgtgtgaaaatccatcaccgtacacttctctgtaaacttctgaatgtgtattatctttcaataagagtttgttttttaaaaaagcctctagtcccaactcttccattttaaagataagaacccaggagttgaagagattccccactgtcttgccatatgagcagctcagggtttctgagagcctgtgcaagaagccagagccctggcctgccttgccaagactggctagtgatgttgttggcacttggaaaggccgtgaatgtgtgacaatgtctctcaccttgaggcccctgaagaataatggagagtctcagagccagctcatgtgtcaaatggaatttctggttttatagcttatgctcttgtgtttagggcagaaattctagcacaaggcctcacacccaggcagtagacaagggtggggaagtttctgatggagaaaagttcggttctctgttactctggccaacctctcattcttttgtttttgtttttgaaatggagtctcgctttgtcgcccaggctggagtgcagtggtgcgatcttggctcattgcaacctccacctcccaggttccagtgattctcctgcctcctgcctcagcctcccacgtagatgggattacaggcatgcaccaccacacccagctaatttttgtatttttagtagagatgaggttttaccatgttggccaggctggtctcgaactcctgacctcaggtgatccgcccgcacttggccaaagtgctgggatcgcaggcatgagccactgcgcccggcctcaacctctcattcttagtcctttttctcactgcatcctcatccttcccgttttgctgctgcttcctactccttttcaggctagcctatttcagaaaattttatcttttttagtaaaattatttgctcagaataaaaataaagcagatttctgtttcattcttcctgggcctgctttgggagggtggtgagtggtgaactccaaggaattgtttgcatggtgtgctaccctgatgggagattctcagcgtccaggattcctttacttttctgtgggggttctatctggaaaccttatgtgactcagggcatagtatgattttgagcacttcctgtggtcaaaaactgttgtctttgattggaaattatgctgtgttctgagtgcttgctggcacgcacacactgttgactgcttgttctggtagcacatctgcgtggggtgccttaaaagtgggcactctctcagcagaaaattcccatgtgggacctcagttcaagcccctcctcactttcatcactttcttctcttttgcttcccttcctctgtgccttcactcctccacactggcctcagcaaatcccatctattttccaagccccatctgaaagcgtgcctcttctctgatgaccatccttgttggagctgactttgccgtccctcctgtggacatccatgccagttgtctgtgtcatctgtttagcagtcatctggtcctaacttttagcttatcttttattatatctaagtgtgatctaacttttcacctttatcttgtctccctgtcacctcgaaagaggacacgacagtgctgttaatttttctatctcccatgggacttaatcggtgtcctccacgtagtatgctttaataatggtttattgctgtgatactgcttcacaaatgccagcagatgccatgctgtatcatcagagatgagattattttatttatttatttttaatttttttattttttgagatggaatcttgctctgtcacccaggctggagtgcagtggcgcaatctcggctcactgcaatgtccgcctcccaggttcaagcaattctcctgcctcagcctcccgagtagctgggattacaggtgagtgctactacccccagctaatttttatatttttagtagagacggggtttcaccatgttggccaagctggtcttgaactcctgacctcaggtgatccacccgcctcagcctcctgaagtgctgggattacaggcatgagccaccggactcattattatatgagtcattattatatgcccagacaagattattataaatttaaatttaaatttgtaatttattttgtgaacctgagcaggtgacttttttttttcttttcttttctttttgagacaggatcttgctctatcacccaggctggagcgctgcagtggcgtgatcatggctcactgcagccttgactgcttgggctcaagtgatcctcccgagtagctgggaccacaggcatgcaccaccaagcttggcaactttttaaaatatgtttcgtagagatggggtctcaccatgttgcccaagctggtcttgaactcctgagctcaagtgatcctcccacatcagcctcctaaagtggtgggattacaggtgtgagccagcatgcgcagccagtggcatcattctttaagtctacttttactccataagccaatctcccattgaaaaactgacaaaaataattctcaactttcaactggtttcagctgaccctctgaatgtgggataatatttgcttgatagggcagtttcagttcagcagaagggctggtgtggctcattggagcttatggaagggggttctaccagggtaataaggtcaatatgtgaatcctttgataaaaaagaaatgggcacaagccaacatggacccagagagagaataaaagtcttaaaaacttgcagaaatgaacagtcctggtaggtctttggtagcctgtccaaatacagagcatggatctaaagtgatttctttcccttcatatgtttattcagttatcatagtactaccttttgatagccttcccctatattttgtgacaattactttatcaaatattcagttcttaaaattgagtctttttaggccaggcgcggtggctcacgcctgtaatcccagcgctttgggaggccgaggcgggcggatcacctgaggtcaggagtttgagaccagcctggccaacatggtgaaaccccgtctctactaaaaatacaaaaattagccgggcgtggtgacaggtgcctgtaatcccagctactcaggaggctgaagcaggagaatcgctggaacccaggaggcagaggttgcagtgagccgagattgcgccattgcactccagcctggaggacaagagcgagacttcatctcaaaaaaaaagagtcttttctaagatttcttttgttttactgattttactttcttgtttttataccaaaatcatgtttcctaaatttttactctcaaaagtgctttaatagctggtaaaattcaactttttctctgggtctttttcttgggttttttgtttgtttgtttgtttgtttgtttgtttgttttgagacagggtctcactttgtcacctaggctggtgtgccgtggcacagtcatggctcattgcagcctcgatctcccaggctcaagtaatcctcccacctcagcctcccaagtagctggaacttcaggtgcacaccaccatgctcagctaattcttgtattttttgtagagatggggtttcgccatgttgcccaggctgatctccaactcctgcgctcaagtgactctcctgcctcagcctcccaaagtgctgggattacaggcgtgaactgctgcactcggcctggattaatctttttcaactccatgtttcattcccataattgctgtctttgccagaatattctttagcctcacaatgtttagtttttacaatcctaaaagaataattgaacacctgttatgtgtcagttccattagatgctggaggctaaaatatgaataagatagttcatattgccccctagaaggactcttagtcttctctggtcaaaaccaagtcaataaaggaagtattagttggaaaccctcagtctccccagcctcaatacctagcttcacttgtacatccagcagcccctggggtctactttgcaaccttccagtttgccatatgtgatattttctattggatcttttaaagatatttttggtatttttttctttctttgcaaaatatttatacgatttttggtattattttatttagtgcattttaaccattccattgagatttttattttatttatatacaaaatgcaattgaggccaggcgcagtggctcatgcctgtaatcccaacactttgggaagctgaagcaggaggattgcttgaacccaggaattcaagaccagccccagcaacatatcgagactctgtctctacaaaaaattagaaaattaatcaggtgtgctggtgcatacctgtagtcctggctgattgggagactgaggcaggagaatcacttgagcgtgggaggttgaagccatggtgagccatggttgcaccactgtactccagcctgagtaacaaagcaagaccctgtcccccacccccaaaaaatgcaattgaacatctttgtaatgtatggtccttcatttcaaagtcatgacacctctctgctttttttcctcttctcttttttcttgtgtagtcattacagttgtttgtcttactttctagggttgatgggatggagtgagtgtaataagttagtctataataatatttctggcctatcaagtacaaggcatttttgaagccaagaagatcctgaggaagcctgaggccagcccccattggagatgactacacacatcaaagagaaaattaatatctctccacagtcagtttgcccagtgcccatgaggctgcaggggttagtgctgcagaagtcagggagcttgcttgcttggagtctgggatggaggcttgtccttaaagatacactggattctctaacaggatgggaggaatagtctaggtgtggaaagtcaactgaatgagagtcaggtgtagaggtgagaggccgtgctgaccacgtagccatattgccctaaaatcctttgaacgtcagcctccagcaattggacttggcctgggcttttcagattttttttttttttctcagatccctagaattgtaagggagtccttctgcatggggacgggaaaggtcaggccaccaggactctggatccttcagccttaaggttcagtttaagatttcatttggaagaaggattttctcactcctgagaaagcttgtcagccctcaccgttaccatttgcgggaaggtagggtttgaaggttttcatcccagagaatctgctgacctgagtcaacagcatgtcctccatggggagggggtctctcccttgttaccttcccacaccagtcaacctcatcagtcagtcccattgtttttaccacctaagcgtgttttcagcctggcccctgcccctgcgtttagtctctcaccctcttcttggtttactgtggtagcctctttgtaattgaccttcctgtttctggtctcatgtcctttcagtcccttatgcacactgctgcaaatatctttccaaaataaatgggatcacttcatcttcacctgcttaaaactcatcagtggttctgtatcactctaggatgaagtttcatcctactacttaccagcaggatgtggtccctgcccactgtctagctctgcctcttgccatttccttcattcactctaaacttcagcccacagattaaaactacgcacagttccttaagctgccattatatttctcacccgcactgcctttccttgctgttccacttcgagactccctcccagagtccttctctgatctgctctgtgagccagggctccctgccgtgtctgtcacgcccggagtccttctctgacctgctctgtgagccagggctccctgccatgtctgtcacgccctgtgctttcccagtgaacacgtagcacactgtactctgattgtcttccttcctcaatggatcctaagttccttgagggaagggaccgggtcatcttcattgtctcctccaagccaagcatacagggctctagtaaatgatgatgaatgactgaatggcacagaaacactccagagacctctcccctcaaaagcttcattcagtggtggaaacgtggaattgtatacatagaaagggaggaggaagaagattcatataacactaaggtcttgagcaaggtggcagtatctgggcaggagcaaatgcccagtgtttagtgtaggggcacagcatgtgtgttgctgatagggcatgcgtgtgaaacatttaggtgggatatctaaataaatgggcttggacagaaggagctgtgggtcagcagagcaggagggaagaaagcaagggaatccaccggcaaggctaatgggaagcctgctgtccctcggctggaggccagccacaaagtgtcacacacatccttcctgagtttggggaaatatctgtaggtcacttcagaatttgggttcaaaataatatggaggccacattattcataatagccccaaaatggtaagaacccaaatatcccactgatgagtgaatggataacgagatataatatattcatacagtagaatattattcggccgtaaaaaggaacaaagtagtgacgtgctacagatggatgaaccttgaaaacattacgctaagtgaggtaaactagtcacacaagatcacatggcccatgatctcatttacacagaattatctagaataggctaatctataaagatagaaagtagattagtgggccgggtgcagtggctcacacctgtaatcccagcactttgggaggccaaggcaggcagatcatctcaggtcgggagttcaagaccatcctggccaacatgatgaaaccctgtctctactaaaaatacaaaaattagccgggcgtagtggtgtgtgcctgtaatcccagctattcaggagactgaggcggaagaatctcttgaacctggaaggcagaggttgcagtgagccaaggttgcaccactgcactccagcctgggccagagagcaggactgtctcaaaaaaaaaatagaaagaagtagatgagtggttgccaggggctgcgagaagggagaaatttggagtggctgctcatggatacagttttttgggtgttgatgacagtgctctaaaattgtggtgatacttgtgcaactctgaatgtgctcacagccatcgaattggacactctcacagtgggtgaattgtatgttgtgtgaattatatctcaataaaacggttgtgaaataataatcataataaacggaggataggtggatagatgttttactccaggtttgctacttaaaatttttcactgagtctgcagtggcctgtgttctttttgaggtgggtccttggagaagagacctgctctgacaaagcttcctcactgcctggtggtttctcctgtctggcacatacactctgtcggactgcttgaggcactgctccactctcaggagcaaccagggatgggagacagcactagtgtcttcggtgaacgtctgcatccagcccgcgtgagctgcgacacacagacccttagagagcacttgcctcctgcagaggtctaggggcagagggttggaccagtcctgccctcaataaccactcagcgacttgttttctgtggggtgtcatcagctcagagaagcaacacgtctttcctaggttctctgaaggagatctactcatgccattgttggatctgtctgctacaagtgttactgggctggattcgaggactttgtttttccatctgccctctgtattttcctaggaatgcttctgtgaatacccccctcccacctgccaaggcaagtgaggcagcagcaccaggagagctggacccctgcacacaccaccactgccaccacgctgcctttgctccgctgcctggcttctctgtttcccctactgaactgtgaggaattggggcaaagactgcctcttctttccattacctgtgacccatagtaggcactcgggtatctattgaaggaattagtgaatttttctttccacggattgaattagattgggacaaagaaagaaagtcatggggtgcagggtgaattcttggggcttgatcacttcaagatctcatcttggcttaagtctgtcaacatttttctttttccttacccagccctaagctatttccattggcaatatattgcacacaagctgtgtttcacttcttaatgctatgggatattgctgctacaagagccatccttggtgtttgcagaaatatttgtgatttgaggaacccagtgcagtgtagagcaggtaatgtgggggagagcaaactcacacccctgcagtctctaacttgaaggactgtgcaagcaggcatgttccttacgtaggggtgcttaacctaaggtctgtggataggctatggaagtctgaactcctcaacattactgcggaaattttgtgtgtgtgcacacacacccaggtgtacacttgccctgtggatggtgcagagtctatacccttcatcaggagatcagagtgaggggcgtctcctcccctgaaaaagttagagatcactgttcattcacagcgtttgtggaaactataccactgatcgagagcaagccaggacgatgatgcagccttgttctcaagggatttataatctagtaagggtgaagatttcaccctaaaccatgtagagcctacaaaaggaggtcagggaggccagggagggctgggaggtagagttgttgggacttaaaggatgactcgaagtggaatgattgagcctagatcaaatcattttctcttcacagctctccgtgacaggagactgcatagcttccctgtgagtccatgggccccaaagtgattataactgacctctagcttgactgtgcccatcccctgccattggatcctctccaaaacagacagtcattgtcacgtatactcacacgacacacagggaaaatagcaaccaacaaactgtttccatgtgttagagtggtagaacctggctccatttccagtgtctcacctccatgtgtatgaactaaaaataggcaaacttggctgggcgcggtgactgacgcctataatgccagcactttgggaggccgaggcaggcagatcacgaggtcaggagttcaagaccagcctggccaatatggtgaaaccccatctctactaaaaatacaaaaattagccgggcgtggtggcgtgcgtctgtagtcccagctactcgggaggtggaggcaggagaatcgcttgaacccgggaggcagaggttgcagtgaactgagctcacgccgctgtactccagcccgggcgacagagccagactccatctcacacacacacaaaaaaaatagacaaacttctggggggtatcagggtgtaatgactcccttggttttttgggttttttttgttttgtttctcttttttggggtttttttttttgagacggagtcttgctctgtcacccaggctggagtgcaatggtgtgatctcggctcactgcaacttccccctcccaggttcaaacgattctcctgcctcagcctcctgagcagctgggattacaggcgcacgccaccacacctggctaatttttgtatttttagtagagacggggtttcaccaagttggtcaggctggtctcaaactcctgaccttgtgatctgcctgccttggcctcccaaagtgctgggattacaggtgtgagccaccgcacctggccggctccctcagttttatccttccctacagagaggtggcctcacatacatccatctcacttatgtttttatgtgattgcagaaataactcccaatgttaagaacactgatgagtggtgcacagttcttcagaaaatatcagcccagtttttcctagaactgctgtccaaaaaaacccaccaagcttgtaaatggaaatggctaataagtgttgtttgtttgtttgttttttgagatggagtctcgctctgtcacccaggctggagtgcagtggcacaatctcagctcactgcaacctccgcctcccgggttcaagcgatcccccacctcagcctcctgagtagctgggcctacaggcgtgcatcagcacgccaggctactttttgtatttttgtagtagagatgaggtttcgccatgttggccaggctggtctcaaaatcctgacctcaggtgatcacccacctcagcctcccaaagtgctgggattacaggcgtgagccaccgctcccggccagctaagtgtttagaataagtaatatgcatatattttcagctttataactaactgagaacaaattgcagtgttgtcctgatgggacacagcaggacaaaaggccaactatttcttgagctgatttcctacagctgctggtgaactaactcccagattgcttaatctaactgggaagtgctctttctttagacttaggcgtgcggcgcacagcctttcgtgagaggtacgaaagcagtgtctgcgggcagcatgacagatgtggccctgagcgagttccttcactcctgagtctccctgtccttgattgaaaaatgaagacaaaagtagcttccttgcaaagtacttgcacatattaaaagagataatatgtaccaagtgccaggctggagctcacattgccaggccctgtgctaagtgtttccatgagtctcatttaagcctcatagcaaccatattagatagctgtgatttccaattttctcttaagaaaaatgggattcagaaggatgaagacagaatctgggattcaaacccagagccattgcctgctagccacactgccttcctttactggagtgaattgaagcccacagaagacagatcaggtggagtcctggctactcacagagcaatggaaacaggcagatagtattcaaccctgttcccctgcactgaagatttacttccaaacctctcttaactacctgaggattttttttcttcctgacaaatctgtacattttcttttcttttttaaaaaaattgagacaggtcggctgcagtggctcacgcctgtaatcccaacacttcgggaggccgaggcaggcagatcacctgaggtcaggaattcaagaccagcctggccaacatggtgaaactctgtctcttctaaaaatacaaaaattagctgggcgtggtggtgggcacctgtaattccagctactcaggaggctgaggcaggagaatctgcttgaacctgggaggcggaggttgcagtgagtcgagatcgtgccgctgcactccagcctggatgacagagcgagactccgtctcaaaaataaatacataaataaattaaaatgaaaaattggccgggcgcagtggctcacgcctgtaatccctgtaatcccagcactttgggaggccaaggcgggtggatccgagatcaggagatcgagactatcctggctaacacagtgaaaccccctctctactaaaaataccaaaaacttagccgggtgtggtggcggggcgcctgtagtcccagctactcgggaggctgaggcaggagaatggcgtgaacccaggaggcagagcttgcagtgagcagagatcgcaccactgcaatccagcctgggcaacagagcgagactccatctcaaaaaaaaaattgagggccaggcacaatggcttatgtctgtaatcccagcactttgggaggccgatgcaggtggatcacaaggtcaggagttcgagaccagcctggccaatatggtgaaaccccatctctactaaaccccatctctactaaaaatacaaaaattagccgagcatgatagcggacacctgtattcccagctactcaggaggcaggataatcttttgaacccaggaggcggaggctgcagtgagccaagattgcgccactgcactccagcctgggtgacagagcgagactccatctcaaaaaaaaaaattgagacagaatctcgctctgttgcccaggctagagtgtaatagcacagttacagctcacctcacaacagcctcaacctccaggctcaagcaatcctcccacctcagcttcccaagtagctgggactacaggtgtgcatcaccacacctagctaagtgtatcttttctaacaccacttcttcagttttctgacaccactgggtgtctgtctagcaattcatttaattctgacactaactcccaaagttagcattagactccataagttcaagggctcagtcccacaagactgcccttcagatgccagttgcaagtactgggtgactaaccagaagtaagcttacccacacttctgtcctacttgccttcaaagtctggcgttaccatcccattcctccctgggttccataatttgctaagatgactcacagaattcaagaaaacgcttaacatacatttgctgatttattataaaggatataactcaggaacaaccaaatggaagagatgcaagggacaggatgtatgcaagggcggcgattcaccaggagcttctgtgccctctctggatacacactctcccagcacctcgatgtgtttaccaacccagaagctctacagaccctgtcactgagggtgtttatggcgtttctgtgatgtccgcttgattgattaactcattggccattggtgattgagctcaatctccagcccctctcccctcacccccagaggtcgtgggtggggctgacagttccaaccctctaataaaggtttggtctttctggagaccagcccccatatcctgcactatctaggggcccacaagagtaacctcattatcatgaaactcaggtttggttggaaggggcttgtttgttctgagacggagtctctcactgttgcctgggctgagtgcaatggcacgatctcggctcactgcaacctccgcctcccgggttcacacagttctcctgcctcagcctcctgagtagctaggattacaggcgcatgccaccacacccgggtaattttttgtatttttagtagagacagggtttcactatgttggccagactggtctcgaactcctgacctcgtgatcggcctgcctcggcctcccaaagtgctgagattacaggcatgagccaccatgcctggccagaaggggcttgttaatgagtaacaaaagatacttctatcactcaggaaattccaagactttggggaactctgtgctaggagccggggacaaaaaccaaatatatatttcttctactacactgccccatcccctcctgcaggggtcctaaatttaagaccttgctagtgggcttcctgcacccttctgagggtgcgcaggagaggaggctgccagcctctacatctggaaggagcaccagggagggcccagcctggggctgggagctcaggggccagtgtgccgcggcagcacagtgagaatcctgggcctgtgtggggcttgttcttcactttacaccccatacatggtttattagttaatctcccgtgagccagaggacagtattaatctcaaagtaatgctaatccctttttacaagaggaaacagaaatccccaagtcctctggcagaggccgttcacagcccatcagaatggaaaaggcctacgttccagcccttttcctgtcttctctgctttaggctgatgaagctgtgagttttatagcattggactgagcagattcagaattttaccaaataccttcccacttggaaaacagccaccctgcaaaaaacctccgtgtttccctccacattcatcatagccaccagttcctagagctatcatgaaggagagttggcgggacgagagctgttaaattcagttagttactatttccctgcagtcagcctagatctatgtaattctgtctttcagagaaggcagctaatttcagtatagatactcccatctatcactgtaacagtttaataggtacggttatagcttgaatacaccaacaggctttatgtgagtaattgccgtatttgcactgctttgaattgataaagtgctaaaatatgaggtatactgtttcatatgctgtgatttttatgggggctgtctgttacttaatctctctccctccccctgtaattctagttttactaacaaattgctttcccacagtccaaatagttttaaaacaaagctttctccttttttttttttttttttttgctaccattcctcaccaccctcccgtttttctgcttgcttataagttaagcacaagtcacttgcattccagaaattccccattgccataaaggcaggcagtcagctcgccagctcttgcctgttccagataagcagggttcatttagcttgtgactcggcattgctagcggatttcctcaggccccagtgccctgatcagaacagtgtgccctggcacaccgcctggagagcccagcagccaaggagaagtagagcttgtttcacaaagtaaccctggccttccatccaagacagaaatagtctgggtggcggcccaaggccccgagacggttccagccggctgctttgcctggctgtcccggctgcactcgccttctccatggtggggagctcgggcagacaggttgctctggcctgagcgtgccaaccaggcccatggcctgtcctgccatatttgccaaggcagtacaaacaggacggtacagcaggctgtcctgtgagagtggtcccaaggagcagtacccactctcggctgcaggaccttctcgggcccttggtggagctggcctgactgtgccattgaattatcacctgggggctccggtggcccttgctcttgctctgtgtctgtctgttcatctcactcacacgcacaccttctgtgctgccttgctcatgaggtttcacacccagcaaatccccatgcctctataacccctgtcagtttccttgacctctgcttttttcctgttcatttcaccaaagccagtgaagcacagatgaactaacctcttctcctccgtgttacactcactgtaaaaacatctaagacccgcataaggtcagtctgggaaggctgagccctgataaaaggcgacagagcagcccattagcaagaatgtggccagcttctgcagggggcgtggccctgtggggactcccagccacagccaaaccatggctctgccctgtaaaagttaacagccaggtctggagaccagacttaacagcagcacatgactggctgtggcgaaataatgaacccactacgttcctagtgaagttaccgggaagaaggggagggagaaggcttcttggtgaatgtagaacctcaatacatctggaaaggaaagtaggagttggatgctccagccgcttagggagcagctcctccatgctggccccagtaaggcacaggccccttgagaacaaacacttgagtcgccttcctccctctcttcagctggagaaacgctgcacttttcttcctccttccctcctttctgaagacagctactgaatgccttccctggtactagttactgtgcaagcccaatacacagacgggtgatgagaggactctgcctgctcctgtgaactcaggggtctaccaggggaccagcattaagcagctaatcacacagctatccagcgactttcacatggtgcccagggctgtccaggaagagcatggagacagtgccttgtggtgattgattaaacacagactctggaatcggactgcccgggtgtgaatcccagccctgccatctgtttgccacgtggctcagtttgttcagttataaaatgggaagaagaatggtagaatacaactcacagagctggtgtgaggactgggtgagacagtgcatgtaaaaggcttatggctggccttggcccagagtgccggcactgcgtaaatgtaagcaattgttgggatcctataacaggaacttaatttagtctaggagtcaggggagacctcggagggagcattgtttagtcacagaacagaggtaaaagtggaaggaacaactgtagggaggccctgcaagttcatcaggactgcagtgaagtataaggggagggtggcaggcttgagcctggtgacaggagcccccgaggccacatgttgagaagtttgtgttgtaccctagatttttatcctagattgcagggactgggatcagccttcctgcctgaggcttacaggcttctgactctgaaaagtattctttcttagggaagagaggccaggaaaggaagggacactgggctgtgattggtgacatgtttgcctcctttcatgggtcattgggaatcaggaacctgaaggaagttaacctctgccctccttaatgcttgggaggaatctgcttgtaaccccaaggggcttttctacttgggcctgccgtggaaaggaagcgggtgttttgtgtgtgtgtgtagtggggtctgtgtgtggggggtaggatatgtgtgtgtgtggtggtggcgtgtgtgatgggatgtgtgtgtgtggtgggatgtgtgtgtgtggtgaggtgtgtgtgtggtgggatgtgtgtgtggtggggcgtgtggggggggtgtggtgtggtgtgtgtggtagggctgtgtgtgcggtggggtatgtgtgtgtggtgggtgtgtgtggtggggtttgtgtggtgggatgtgtgtgtggtggggcatgtgtgtggtgggatgtgtgtgtggtggagtctgtgtggtgtgtgtgtgtggtggggcatgtgtgtggtggaatgtgtctggtgtgtgtggtgggatgtgtgtgtgtggtagggggtttgtgtggtgggggatttgtgtggtggggtgtgtgtatggtggggtttggtgggattgtgtgtgtggtgtgggggtgtgtgtggtggggtgtgtgtgtggtggggtttgtgtggtgggctgtgtgtgtgtggtggggtttggtggaaagtgtgtgtgtggtggggcttgtgtggtgggacgtgtgtgtgtgtgtggtggggcaggtgtgggggggtgtggtgtgtggtgggatgtgtgtgtgtggtggggtgtgtgtggtgggatgtgtgtgtgtttgtaggggggtgtgtatgtggtggatgtagtacacctgtattgtgctcgcggtctgtttctttgttggtggatctttagcctgtaagatccctcacagtggtggcaccagctctcctcggagtcacactgccatcactccagtgccactgggcctgcgtgggcatgccagcaaagtcacacttcagagcatgaagacgtctcacgttcttggcaggacggctctcccagctgctcctggctttgaatgttcactcccgttttgcagagcgcagtcggctcacctcgattatggaccacactcttcctccagaatgggcagggtgtcagctctaggctggcctcaagttctttgccagcgtggtttcttaagcccagctgttgggatatgcattttcttgaaagtcagggaaaagaatggagccccctgttgggctcagagcaggtccagaagtcctacttgacggttcatggcagcaaatgcataggcagcttctgaaggatcagccagatgctagagccatctgatcccccagacctggtgcgatgttgcacctcctccctcctcctcagccctgagatttatgacatggccgtgtgcgcatcgctggcatcgggaatgtataaagccacagtgcctgcttgtggcactcacacccagtcaagtcatcgtaatagagtgttagtggccttctatcatggggggaaagtctggcacaggaagaagcaggtcttgactgacaggggaattacctgggaagacagctaacgaaggggcaggggagggacagaggacccgagtgttcaaggaggagagcagccagaaaaccacccaggcacctcccgagcaggaaggcagcagggggagctgcggggactcgtgtgatttcaatagtagcgcttctgcggagagacacagcgaggaaaccttctctatggagaggaggccgtcgttcttctcaggccagacatccttgccctccagttcatagaagagaaaattgagggccgggcgcggtgtctcatgcctgtaatcccagcactttgggaggcaaaggtgggcggaccacctgaggtcaggagttcaagaccagcctggccaacatggtgaaacctcgtctctactaaaaacacaaaaattagccaagcgtgatggtgggttcctataatcccagctactcgggaggctgaagcaggagaatcgctggaacccgggaagcggaggttgcagtgagccgagattgcacattgcactctggcctgggcaacaagagtgaaactcttgtcatctcaaaaataataataatatttacagcatcttgacagactcattaatgatgtcattaccccattttggatgaggattccaagcccctgagaggagaggcgatttactctcagacacccagcctagctataagacagaaccaggatcagaaccaaggtcattttggtgtcaaagccatgcatgttttaaaatgtttttctacaaactgtcttgttttggccacgctctcagaataggtcatgcctacaggcaggtgccattgttgaggcttgttaagagtgtagagaaaaaagaatactggcaggcattgtgcagtggactgtgcatagacgatctcatttattccattgtacggtcagattagctgaggtcaggggcaggattcgaacccatgtctccctgacagcagaactcaggtgctcatccacttgccaaccagctttccacttagatcattaggataatagctactctctcagcactaagtgctaagatctcattaaatacataccaccaggggatgaggtgagaactgttatctctgttacacatagaaggaaatggagacatgattgctttgattttgacctaaatgctctcctgccccctcaccctttgatcttccattgaggtgagattgggggagtgccgcagtgtggtcctcagaagacacaccatagatacactgttagcattggatgaaaaagaagggcttcatacctttccacagaggtcggtcctcttcaagaccatttgaatttaatgctcaaagagtttccttctctccctgagtgctcagcacccctccggccttgcagtttagcctgccttagacttagtcttgcatgtgtaaaagaaaaagggaatggtttattagatgcttccagactccagaaaagtcgacaaaagttgttagttaagtcctgcctggcatggggtgttttagagtactagcagtgccaattaaatttttttaaaggactaagtgctgagtttctatatctaaatatagaaagtaaaaaataagcaagtctgagttcgtcttggaggaagtattgatgtgttgctagaaaggaaactttggaggaactgagtcctggtgtgaaggagcagaggcgaagcctgacgctggccgacagcactgctgctaagaagggcctgcctggggtccaggatcaaaacctgtttggatatttcagaaaatcaggataccaggaaaggaggtgattttccccattgatttccaagctcctgaggggcatctctccatttttttagtgtccgtcctgccacagacacctcccaggagcagggccagccaccacagctctgacagggcagtcgaagggctgaaataccagttcctagtccatggggaagtccccaccagctctcaccggagggccgtctagtcttcctatgtcaccaaagtattttttggtgttttgttttgttttgttttgttttgttttgttttgttttgttttgagatagggtctcactctgtctcccaagctgaagtgcagtgttatggacatggctcactgcagcctcaacctcccaggctcaaatgatccacccacctcagcctcccaagtagctgagactacaagcatgacaccatgcctggctaattttttatttcttgtagagatggagtcttgctgttttgcccaggttggtctcgaactgggctcaagcaatcctcccgccttggcctcccaaagtgctgggattataggcgggaaccatcacgcctgccctgccaaagtatttttgtggaagaccaagactgaaaactgtgtaaaggagccgggtgcggtggctcatgcctgtaatcccagcactttgggaggccaaggcgggcggatcacttgagttcaaaagtttgagaccagtctagccaacatggcaaaaccccatctctactaaaaatacaaaacttggccaggtgcagtggcaggcgcctgtaatcccagctactcgggaggctgagccatgagaatcgcttgaacccaggaggcggaggttgcagtgagccgagattgagccactgcactccagcctgggcaacagagtgagactttgtctcaaaaaaaaaaaaaaagattaagcaatgcctaagggcttgttttcgtataaaaagcagcagttttcatgctgtttggaagtgctttgttcctaaagtatgtggtatctattttgcctggtatattacccctgattttattgaatcatagaattcaagagttctgactaagacttctctggagccttagagctctggcacatcttctagaatggcagttctccaagtgtggttcgctggccagcagcagcagcatcatctgggaatgcattagaaatgcagattttgaggccaggcgcaatggcccacacccagaatcccagcattttgggaggcaatggcaagaggatcgctggagcccaggagtttgacaccaacctgggcaacaaagtgagacccccatctctacgaaaaaaaaatttaaaaattagccaggtgtggtggtgcacacctatagtccctcgcagctactcaggaggctgaggtgagaggatcgcttgagcctgggaggttgaggctacagtgagccaagatggtgctactgcactccagcctgagtgacaaagcaagaccttgtgtacaaaaaaaaaaaaaaaaaaaaaaaaaaaaaattcttgggctcccctccaaactgactgaatccaaaactctgtggctggagcccccgcacctgcaccgtaacaggccctccaggtgactctgctgcatgctcactcttgagaaatagtgattttgagcatcatagaagaagaactcaggtaggattcaaatcccatctgtgcgactcactcattctctacatgttcctttacctcctggtctcagcgttcctgtctgtagaatgggataataatcaccagtctggaggggttattgtgagaactgctatgaaaaggcacgaaagcacttagcaccgtgtgcctcatacagagtaagcatttgataaatggcttatcattattgttattagctagcttcctagaccaggtattcatctttttaaacagtaccccagtcagatggttgtctggtgagaggagattcaaaaattctggtctatttcaatgaataacagctatggctgttaatagttatatattgagagaatatttgccattctgtaatgtccattctttttttttttttttttttttttttgagacagagtctcgctttgtcacccaggctggagtgcagtggcacgatctcagctcaccgcaagctccgcctcccaggttcacgccattctcctgcctcagcctcccgagtagctgggactacaggcacccgccaccatgcctggctaattttttttgtatttttagtagagacggggtttcacaatgttaaccaggatggactcgatctcctgacctcgtgattcgcccgcctcggcctcccaaagtgcggggattacagacatgagccactgcacccagccttgtaattcccattcttgattgtagctctgtcccctagaaccattggaacaagacttttctacatggccttgttcagatatttgaacatagtgatcttggctgttctgagctttttcttgttctatttccaaagattaacttaaacatagaagataattgcagccagtagggagggcttttaaaaaagaaggagagaaacagaaaaggcctgcagccaaggctatgctttggtgacatgggtctttggagatttctggtaggtaaggatgcctgtgagtttaaggttgaggctttctcagatggacttgggagcctgcagtagacatggtgggtggaggtcactgttggtaagaattctgccttctgccactggcgggtgtgggccagagtcacccctagggtgtttccatgtaggaacagtggggtgttctagacacaaatgccttaatatccagcatctttgccagggggtctgctccaggaccccagcccttttcctgctgtggtctcaggcctttggcaagctgcccgtgctctttccagcgtcctgtttctcacctgggttgccagctccctgcagccttggtggtgtttgcagcctgctctcagtttttttaatctttttttaattgatgtctaattagtagttacgataaattgcactagccaagcaaatgctacctttcctaaattacgccgtggtattgtgtacgacagcagcagggttgctattttaaaatgggattgcgtaaaataaacatgtgcccagatgacaggaagtactaagttgatgattaattgatgctctggtacggcctcgtgctttccagtgcttccatttgtgtgacgatccatctagtgaagtttcagcaggtccacaccactgataattgccagatcgctaatttgcagttcgtctcctgccctctcatgccggggccggtggccattatgaggcaatgcagagcagtcctcagtcccgctgaaggtcagggtcaccagaaggtgatgtgcggccctcggctggccaggtcttctgcagctcggagactgcctctctacactgagactcaggaacggtgacattgctgcattattccggactcttgagactggtgctatttgtcctgtcattttctttgtattatgtagggctgatattcagggaaagggaaaataacttagatttagttttatttgtttttttcaaattaggagatgaagacttgagcctgctgacacatacccaaggcttgctcatatgtgaaataggtagaagtttaaatatgtcttgagagcagttgagaaaagagtcagtggaaaaattactaactagtgctggtgagcagggtctcgacagcacagggggtacgggtgtgccatctcaaaagctgccctggtgcttaggccagagggcttcacccaagtgtggtgctgcttctgagaaacgggggtgctgtggtctgtaccccagcctggtggattaataggaagcagcagaagcttgagccaggtgtcttctggaacactaaggaggcaggacagtggcagagtccccggactcagaccactctgcctcttagcagctatgatctggggcaaggacttcacctttctgaatcttagtttcctcatgtgtgtattctctacctacccaatagctcttcccatgaggtgtgggagattaaatggcatcatcgtttatttaataaacaagcaaatggtggatggggacaaagcacctagctcagtgcacagcgtgtgaccactctgatatggaaagtgccagcactctcccaggcgagtacagcagtggcagctcctttgtaactaggcgttgcttggtaggatgtccctggggttggtccattaacctccttttctctcggggaaagggccttggtgcaattaacagcttttaagccagagaattgatgcctcttgctccagtgttcttgaagcctcaagaagtctgggacccccagaaaacaggcaggccagttgcttttatcttgcctgatggctgtctctccagaggtagcagtgacaataacaaccaacacgtggctctcggaagcctgactgactccagggcccggtgctctctactgtcggcactgtttctgttgtccaggggcagcacccacagtgcttcctctgtgcaccttcagcaagacagagtcgctcaaagccagtcttcagaagggacccagggttgctttagccatgagaccccatgtcagttttcacagtgacttcactgtcctttcgacaaagtccttgagatcttgatggctcacagtggacttcgttcccaggacagggtgagtggactcagtagacagcttggaatccactctaagctgaacagtgctcctctgcccacggtaggatggggagggagtgggagcccatccttcccttgatattttattctaacttacgtatttaattgacttttactactttttttcttgtatcacactatacaccaaataagttccagaatgatcacagaatgaaatgatttttttaactgataaaaagaactagaaggaaaaaaaacaatagctgatacaggaataggaaaaacctattctaagcataaaaaccaaggaagacatcataaaggaaatggctggtcttgaaagcctaaaatttttgaattatatacttcaacaaattcagtaaacaaaattagaagacagataacaaaaaggaaaaatgtaaacatatataacgttgatataattacttaatattcatagactttctcaagttcaaaataagaacactaggaaaattaacaagaacatgaatacgatattcacaaagtaagaaatacctatttccagtaatctgttaagcttttactagttgtcaaaaaaacatacttgtgagttaattttatttatttatttatttattttcagacagagttttgctcttgttgcccaggctggagtgcagtggcacgatcttggctcaccacaacctccacctcctgggttcaagcaattcttctgcctcagcctcccgagtagctgggattataggcatgtgccaccacacccacctaattttgtacttttagtagagatggggtttctccatgttggtcaggctggtctcgaactcctgacctcaggctatccacccacctcgacctcccaaagtgctgggattacaagcatgagccaagtgctgggattacaggcgtgagccaccacaccctgcgcaagttaattttctaacagtaaaaacttggaaaaccctgtatcacttttttttttcttttttttcttttttttttttttttttgagagagtctcacctgtcacccaggctggagtgcagtgacgcaatctcagctcactgcaacctccgcttcctgggttcaagcaattctcctgcctcagcctcccaagtagcttagattacaggcgcgcaccaccacacccagctgattttgtatttttagtagagatggggtttcactatgttggccaggctggtctcgaactcctgacctcaagtgatcctcctgcctcagccttccaaagtgctgggattacaggcgtgagccaccgctcccagccaaccctgtatgattaacagcatgactattcttacagtgatcatatactttggtgtctttaaaatcatgtaaaagaataagaacttgaagtgattaaaataaattcacaacatactttgtaagtgaaagtaattgggttaaaatatatactacctctgttttttaaatgaaaatgaaaaactcaagagtatacatcaaaatatgaacagaagttatctttagctgctgtgcttctatagtctttccatttttaccaaaaaacaaatactttaaaatttttaagtgaaaaagaaaatggaggtcagatgggttgaagcatctagaaaaatcaaacgagagtgtgctgaggcctgctcctctcttgtggtgggcacctcatggactttccctggctttctccttgtcttcgagcccagccctcctcattctctgctctccagttcctgctcctaagaccctgcctgtttctcctcaggactgagcacggaaggcatctaccgggtcagcgggaacaagtctgagatggagagtctgcagagacagtttgatcaaggtaaagtgcagcctggccaggcatccgaggccagagctggtcaaggcagacacagctgcctcggtgaactgtctgtggggcttcggagcactcctgccagcacagacccaaagccacgaggtgctgagactgagaaagagaccatgtgtggctgcagcggggaggaggggaccgggtcctgtcagtgaaccgaagcaccatccctgcccaagctgggtcatgtaggccactccccacactgccactcacagatgctcttccaggttgcccgggcacatgcctccctcaccacactgaagagctttgcctgttttcccatgcagagctagttgcaggcacatgatatacaagtcgggttgagatgtgatcctgttttgccagggcctcagatctaccctcctcacaaagtcccagcaccagagaaagtgagggaccatcgtgtgaggagctgagcccttgggacagagacccaagttacatagctcttggcagggactcccttctcctaagctgagccagcttcaagaggcctaaagtcaggcagccaaactacctcttggaattgcccacactgtgggatgagaagccacgtcccccagtgccagaagcaaaagcaccagagcagggcacattcccatctatcagcagccagggcaggaggcaccacccagagtggacaccacacccacttcccaggtgggcggcccttgcgccttgcagcaccgcagtcgggctcagctggccggcagcaggcagaggggaccgcaggacagggaaacgcctgctaatctgtgggagacacgaggccaaagtgagggtagagcccccagtgtgggatgcatttgtatatatgggagatcctgtaccagcttacctcccccatagtggaacctggtactgtccatctgtagagatttcttcgtcatcaggaacgcactgaagtatgtatgcaatgagaaggaaagcatgacatgggtcagcggtgcctgtggctgggaagggccagagagagaaaaaatgagcctatttgccctcccaccataggggacaaggatggaggcagcagtcacagtggttgctaacatctttgtgacctacctggaaagcgagccaccctttaggaaagccgcctccttcttctgtgatgggaagggagtaaggaagaggcaacagcatatcaaagccagatgaaggcaagctcctggcaccaaaaaccagcatgtgggggtagcacccctgccccgagagtggtagaaggggcagttcagcagtctcggaaagaggtgctggggccagcccatgcctgaacctcagaactcgcgttagcgctcacaagtcccacccctccaatccttgccagtcctgaggccgtctctggctccttgaggtttctctagcctctcctgagccccgagttgtcctgatgcttctgcctggcttagaatggtttggcctcactctcctgacttcctttcagaccacaacctggacctggcagagaaagactttacggtgaataccgtggctggtgccatgaagagctttttctcagaactgcctgaccccctggtcccgtataacatgcagatcgacttggtggaagcacacagtgagtaccggcagcccagtgttgggcggattgagggagaaagggcttggcactggaagaataggtcctgccctcagaatggatgctggctgttagagctgaggtttgaaggacagagggcaagggaattaaccagatgacagcaatgggacttgcaaatcgggctcctgcccttgtagaccttaggtgcttatctgagggttacaccaagagagttgcaggtttcccccaaactctcattagttaagagcatggtttcggtgtcagacttggctccttcgcttgtggccgacttaaccttccctgccccttgtgtcctgccgttgttaccatccctactcctgcggatgaaattctattcggaaaggcctagaagtgaggctgtgaatagcctatttaatagtaggtcttatttttctttcccctcttcttacctgtcttctcctacctctcatgtaatgaagttaacatgggtctagggtcctacagcctcttaggaagccggcctctggagggaaagagatgactccagtggccctggccaagtaatcatttgatgctgtagcaaattagcacctctggttttaatggtatcctgtgtgccatgccaccttgcctcatcagttgttcctgccccagcctgcctctctgtagaggtgtttgtccagatgggcgagccttctcactggccagcctttccctggactttgtgtagtaccacagaggatgcctgacctctcagagcgtcccaccatgtggccctcactaccttttaagtcatcagcagccttcctgctttgtgcctctggcaggccaagacccagcagcagcccttgctgtgcagctgcagaagggagtgtctctgctagctgcccagagatcacagccacctgtgatccagcaaccagagggtggggaagaggaaaggagacgtgttcctcaggggcaagacattagtctcatcttgtcactgcccacctctaaagagggagctttaaacaagcacaatttattcacaagcctgatggtgtaggcagaaatttgagggaggtgatggatcagcatggccccgagtcctgggtcactgactcttagtagcatctgaaggagacaggtgtgcaagaagcccacccctgaactgtcagagcctcaatagtgacagggctgcggggcctccaagctcatccttccagggtctgcacttcctatggtgtctgttttcacaatctggatgccaccttcaccttattctgtccacactctcttagctgactggaattgttcacagctcctgaccctatctaagcccacagggatggggcaggagagcgtggtactcctgggagggtcatagagtagcctgctttctgaagacgggagtcagggtttctccaggggagttagtgggtggggacagttgcaggcttctcccctgatcctgctgtctgaagatagaggctttcccagcagtcacttctccagcaggctccaggcaggcacagatgtgaagtcgcatgggaaatctctattctggagccagctttctttccacggaagcttgtctcacagtggaagttaggaaaagaggaaggcgtagactgatacccagtttgctggaagccgggaattcctgtctgcatttgtcttgacttggcgccatctagaggtgcgtgaaatcctgccacccggcagaaccccattgtttctgcgggaactgctgacacagcacctttttgtgtagggttgtggggccggcaggaacgggaggtgctattgatagggaatcagccacccttcccacagcagctctcacccagcttccactgctcaggaggtggcttctggccgctgctactgcagcagcctgggaaagggtggaggtttcccacttcctcttcccattgtgtgtttcctgtccccgacggtactcagcgggggctccgttgtcttgaacctgaccgaagcgggtgggagaggagaagatcttgctgacatggcacctctcccggccatagcagttgactgaaaagctgggctgtggatgttgcagggccaggttcaactgagccgcagataccaggcagtgcaaaagttagtagtgttaagggatattatggaaaaaagatgattgtgccccaaagtagctcttcccagactggctggggtttccatggctacatcaacttgaccagttctttctacttaatccctgagagcaattgtgtctctatatgttcaggccttggaaccagtttcaaatcccatcacaacaaatatcaaggtcactagcaaatggttttgttagctccagaatttcacaatattgaacactgctgaaaatgtactcgcaaaatagagacgtttgtgattatttgccagttattttcctcccacactcaaggtgacacgtgggagattcagaaatgaacagcagcagcaaccgcaccgcccatggcctgtgtgcctgcctaggctgggcccggctctccacgaggcacttgattcccaccactgatcttcctttgaggaagatggtattataatacatctccattttacagagaaggaaacagcttctcagaggtgatacagcctgcccagggtcacaccgctagggagtggcaagccggggcttgagtccctgcgtacgtgggtgcaaatgaagttctctgaagacagagcaaagctgagcttgaagtgcacaaaccccagcaaggaaggcgcgaggaagagggcttcacaggggagatgggccagggtttcaggaggcagaagaaaaggcttgcgctgcctgttctgtctcctacctgtagcccacccccaccttcaagagtcgctcttgcctggtttctccccgtctctgtgactccctcctccctgcctatctggagtcgaccccgtccagctggtgtccacaggccctgtcctatggcttttgtgctggaaggggtgctagagctggctccgtctcaagccagagggtcaggaccaaaggacctgtggctccagggtccgcattaactccctgtaatagctcacaaaattcagtctttttaatttaaggagagaccagtcattttcatcacattgttgaaggggatgtgtgacccgaacatggttcaggatgccagctcattgtctcggcctttccatttgacagatgagactgttggggctagagataacagtgcagcctaggttaccaggggacggccctgctgctctctgggctcttgttcaccagctgccttgggacgttactggttctgggatcctgccttcctttgatctgtccacatagctgcccgagggcacgggggtgcttctcacacccacgtacggggtcattaatttcacagctagccaggccccgtgtggacagggacagatggcagtgggcacacacatatgtggtcccaggctcagtctggtgggacaggacattcaacaggtgattgcaaagccgtgtctccaggggaaggacagcttggattctccatcctgagccctgcagagtgaggtcttggccttggagttgtttaccacctggggcggggagagccgacgccggacgagcctgcgtgatcactgaagggctgtgaccttgagccgggctttccctttcctggcgatgcaggcgtgcagatggtcagcggcggccagcagggactttcctccaggcaccgagctggcagcagcagacccaggcctagagcttggttggcagcctggctgccagtgatggcaagtggcgcagcacagccagggcaggagtgttctttgggaacagggtctctgccgccactttgtttgaccttggaccggtattctggctttgtgaggcctggtgtgtctgttttgtaagaggtatgggaagctaatcggtaaggtccctgtgccctctgtctgtcccctcccctccctcctgagttcttggggtctctattgtactaaattgctggatctgtgtccaggctgtcttggttcaactggcccaaaaatgcctcccttggacgtttcttgttgtctcagtcgatggcccctaagttcaaaagtatgatgtcccaggaagaggtgcagctcccagcccacgccccctgagcaagagcagagccacctggagccaagccaagcaaaggggtgagcgcagtgtggaggctggggtctcctccataggccaccttctctcccggcccacgcccctggactcctgtctacccctgaccacacactggagcaggatgggttgtttgttgttgttgttgttgttagaaaaaactaagtgtcttgactcccaaagggcaggctgagggagcagaggatgtgaggatcgggccctccacagtctgggtcctgaggggactctgaagggggtggaggttacaccaaaagtctggacgagcggacctgggaatccacaaaccagcacacgccaggtgtggggagaagccaccctgggcacctgtaccatggcgggtccgggttgcagcagctcacccagggctgggtgccctgacggccctgtcccagtagggacaccagggagcccattgcccctgctgtttctttggccagtgtagacacctggccgggcgggctacctattgaagctgggggtccctgtacagcagggctccactgaagatggtgagtggctgccctgagtgtgccgctgccctgtgaccaggtccacacagactgtggccccagccttcggcagcaccatagggtagaaggtgtccagggtgcacgggctgggctggctcttggccaccagcttgttccccaggcctctggcttggagcctcgggagtctgtgcttgaccacacccaggcccaggttggagcgggatagcccagtcagcaccgtgctcagcaagtagcagccagccagaggcgccgtgaactcgccggggatgaggatggtggtcaggaggggaaacagaggcagggccaggaaggcctcgaggagccggcccagagctcctagactagagaggcacccactgggtcctttcccctctttccactagaccgtaagcggcagggaatttggtttttgtcccctactgcatccccagtgtgtaaaatagtacccaggcaggagcgggtccccgtaaatatctgctcctcccacccactgcggatgaacaaatgacccaaggaggaggggcctcccaaatccgagaatgaaagaattcgcattgtctgacaaggcaagaatggggcgctgtcaccacacaacctcacccatccccacgtgctcagcccagcccttctcatgctcacctgcctctgggtcagagtcacctcctccctcgctgaggactgttgagggacctgtgcctggttccaaccagggcagctgaaaatgccacacagggcacagacactgctggtgcctcccccagtcctgagtcaggggagggtgggtatagaaaaaaggctgggtacagtgtgactgggtacagtggctcatacctgtaatcccagcactttgggaggccaaggcgggcagatcatgaggtcaggagttcgagaccagcctgaccaacacggtgaaaccccgtctctactaaaaatacaaaaattagctgggcctgtaatcccagctactcaggaggctgaggcaggagaattgcttgaatctgggaggtggaggttgcagtgagccgagatcgtgccactgcactccagcctgggcaatacagtgagactccatctcacaaaaagaaaaaaagtgtcctagctggtgaagccagcaccctggaggccccccatcccctgtcctgtcagaggattactacagtcagagagggctctgccgcgtgcagggaggcggggacccagagcagatgggctaagctgggagacaggcctgggtcccatccacctttgccatcaccagccttgtggccttctcttggcctctggagtgggtttctcagccaccatatgggtaacgcccagccccaccttccactcgggtctgcggtcagggccatgcacagagcactgtgaagctgtcctgccagcacttgggcagcacccaaacctaagcagctactggtgcctttgccatgtgaagaggctgcagctggagcctagagtaggtccctccccagagaggccctagaggggtgagggcaagctttgcttaaggaaagaggtgaatggggctgagtcaaaggatgttcacaaggtcgaccttgcttttagtgtgggccagacttgagcagaagggcctctcgccctccttgacctctgcccagcgagctcctagtgctgctcagtactcaggagcacctggaccaggcagccagtggggaggggagcaggcgaggagactggccacccgctcctcactaggcgttcggctgaggtgcatatgcagaaggaggctgggattctagggggcagcccctaaatttattttttttctttttgagatggagtcttgctctgtcacccaggctggagcacagtggcacgatcttggctcactgcaacctccatctcccaagttcaagtgatccttctgcctcagcctcccaaatagctgggattataggcacacgccaccagacctggctaatttttgtatttttagtagagatggggtttggcatgttggccaggctggtctcaaacccctgacttcaagtgatccacccacctcagcctcccaagtgctgggattacaggcctgagccaccgcgcccggcccctaaattattatcaatgcaggctttgtaactcccacccctgcccctccccaccccctgaagaagaaacaaaaccacccgccttgctactcatcagataggaaggagagcaggcatctctggcagacctaggctttgccagccccgtttcctgcctccagccagaggacgggatgagacccagctcttatgtaaaggtgctaccactcgatgcctaattaagacaaacacagctgtgtttgggtcgtgcaggcacctacggagagacctgtgtcctcctgtgccaagctagcagctggaagggggcatgacgattttattaagtgaagctttacaccacacacatgctgcttgtgttttctaatacggtcttctgtcctccctacagcagtttactttgtttatgtaaacattttattgtaaaatgacaatgaattgtttgaagactcaaggtcgtagaaaagagtgtgcccatggccgggtgcggtggctcacgcctgtaatcccagcattttgggaggccgaggcgggtggatcacctgaggtcaggagttccagaccagcctggacaacgtgatgaaaccccgtctctagtaaaaatacaaaaattagcaggcgtggtggtgggcacctgtaatcccagctacttgggaggctgaggcaggagaatcgcttaaacctgggaggcagaggttgcagtgagctgagatcacgccactgcactccagcctgggcaacagagcgagactccatttcaaaaaaagaaaaaaagaaagtgcccttgaggtggaacccttaaaataaaccttggattcagagagatgaagctgctcatagcccaataactagctcccaggacttttttagtcatttctgatagacagatgttaccaagacactgctcttatcaagtcacactctcaaggccacagatttgccaggtttcattcctcctcattaggctgcccgggagagctcctggagctctgtcccttccagccctgcggcctcccttccccacaggctcctgcgagtagactggctcccaggtgcccttattttgtgtccagctgtgaactcttcatttaattgccaggtgtcaccgaatgaaggaggcactgtccacagccccttttacagacaaggagactcaccctaaggtgtcacttgcccaaggtgacacggttgacgcgagaggccggatttgtaccagggccatctgagtcaggatctggactccagaccaccacaggaccttcctccctgctcagcgtgcccgtcattggcattctgtctgctcttccaagtctcactctcaccagggtgcttgtgcaactcccccaactctgaccctctgggtacgtcacctgctgcaaggtgactaggaagctatgggtttcccaaagaatgcttgcttcagggctgggcgcggtgactcacgcctgtaatcccagcactttgggaggctcaggtgggtggatcacgaggtcaggagatcgagaccatcctagctaacacggtgaaaccccgtctctactaaaaatacgaaaaaattagccggcgtggtggcgggcacctgtaatcccagctacttgggaggctgaggcaggagaatggtgtgaactcaggaggcggagcttgcagtgagccgacatcgcaccactgcactccagcctgggtgacagagtgagactccgtctcaaaaaaaaaaagaaaaaagaaagaaaagaatacttggttcagggagtccgcacccctcccggattcatcagcagaatggcacacatatgtctccggccgagacggtctggcaccatcatctatcccaaaggagcccgagcccccgggcccattagcaatcatctgcgctttaacaggcctctcttcaccacccccacagccgccagctgtgaggtcgctgccatctccttcgtgagaccctcctgtggttcttctgagccctggagtccacgaaggaaacatgggggcatctttccctgcacagagaaatctgtcttagccagctgggctccaggtgggctctgggacgtttgtgcctcaccagccccgatgcccttcccagtcaaggtgggccacacccactcggggatggcaagcccagtggccacagctcaggccccacagccagtcccagctctgcaacttctaaactcagatacttcatcctcaaaatggggtgacgagttcctgcctcacacgattgtggggactcatggaactgggcctggcgcgggttacaagctgcattccaggcagttgttttccctcccccaggacattaggattccatgataggcaaagtgtgggcgttgggggaaaagggggtgcgtagttcctttggtgaagtgcataagaattcccccactgtttccatcagcccctccaacggggatgtgtggacggtccctgtgtctctaggaaaaggacagagccttggtctcatgaccgactgactccctccctcgaaggcctgttggcgtgggtgggtggcagcggccgcccgtctccatctggtcaggaagcaagcaggctttctgcgtagggatgcctgtctccaggggcaaccggatgagcaaagaatggtgttctttatggcggagtgtctccagattgttctgtcttgggtggtgggggccaggaagccccaggcacacagtgccgcccttcagcgggggcctgggacacagaggtgggccagacccctgggccagtgccactgccaggtgtgccagccttgggcacaggctttgggggaaagagtggggttagtgtcatccaaaagccctgggctgtcctcagagaaggcccatcacagagcacgccctggggtggccaccagcctcggccatgaaaggcaaggctttggttttctctctcctcagaaatcaacgaccgggagcagaagttgcatgcccttaaggaggtattaaagaaatttccaaaggaaaaccacgaagtcttcaagtatgtcatctctcacctaaacaagtaagtcgcagggccttctggttggtttttcctcctgaaaattgacagccagggtcagtgtgtcgcagaacaaggctctgtccacaagccagtagaagcctcaggccctggcctggaaggggtgctggctggcctcccatggtgcccgctggtctcggtgcccagagcctctgcctctcgcccatcctcaggcctccctcctgctcctgtctgagggcagcccacgtggcctcaaacctgcctaacaccagatagggcacttagctccagcgggcatggggcctcttgtaggcctgtgtcccaaagctggcagagagagaagatcttctggttggtactgatgctccagaaatcttctcctgaatcaaaaacacctcagagtccctgaaagtcctctcacagcattcacgttcccagctggggagaaccgggacactgcacctcgagagatgtgctgcaggagacagccagcctccggcatggagcacagccgcaggcgggaggccgtatggttgttccctgaagttccatgtgtgtggaggagatctgctggccgagtggcctctgatggcgctctggcttaggacactcagcctccctccctcgtcacagccggagcaccgccactgctttggctggctgcagagtgagtccctgaggtggtccatccacccccaggggtttgcggggctccaggcagcctttccgaggttggccatgtagaggcactgggctggaggggagaggacactgagggcgcagcctcccaggcagggcagggtacagagagctgcgcatggccttttctgctccacctgagggaagaaaggtgggctcagcctgggtgctgaagaccatgagcgcccagggccaggtggggccctgcacagttctgaccattgagtttggtgtcgcccgcagggtcagccacaacaacaaggtgaatctcatgaccagcgagaacctctccatctgcttctggcccaccttgatgagacctgatttcagcactatggacgccctcacagccacgcgcacctaccagacaatcattgaactctttatccagcagtgccccttcttcttctacaatcggcccatcaccgagccccccggcgccaggcccagctccccctctgccgtggcttccaccgtccccttcctcacttccacgcctgtcacaagtcagccgtcgcccccacagtcgcctccacccaccccccagtccccaatgcagccactgcttccctcccagcttcaagccgaacacacgctgtgagccaccaagacctggggcgacaggagaaccggtcctctctctgacggggtggcatttggccttgaacaaaaccaagtccactggggacagaggcaggggcaagtggctctccccattaccttctcaagacctcagtgggagcaccagccaatggtaccatcggctgggctgccaggtaccctgggcctggcgctgcagacctgagctggcttggacccatttgaggactgaactaggcaggcaatggctccagtgccctccctctgttccctggaccaccaccccacgtagctgctcacaccagcctccgggtgcctccctctgcttgtacagagcccatggtcgggacagtgccctggcctttgccggggaggaggatgctctgagattcagggtggggctggcaacccctgaagagaacacttcctgttggtctgtctcttcccaccttccatctgcacacacccccaaggtaagggtacagcccggctggcggcctccttgggaacgtgtaggccacggctctgccaccactaggtacctgctgagggcgctggctctgcagatcagaacaacggaggatagctttgtgcctggacccagagagtgtgggactccccgcttcatccccaccgtcccactccacagccttcccgaaacattccctggcaaacaaaggaacactaggagaaaaaatggaaaaacccttccagtaattaaaaaggaagaaaccacagaaagaaaactacagacctcaagattccactctgtgcccgcctctgccgggagggagggaggcacacaggtggagctgaccctcgtctttgtggcagcaaaaccaggatgcctggagctgtggcctgagggcctgctggggtcccactcacccacttaggtctagtcgctagatcccccgttttcccaagaagagggttcgagcccttggtggggacagctggggagatggcagtgcaggctggaacctgggctgccccagaacacagtccattacgatagaaacactaattgagcatgtgcgtggggtgggggtgtgtgtgcacatgtgagtgtgagtgtgtgtgggcgcttggtggggggttggggacagctggaaggtgccaggtgcacttggggttggggttggtgtgttgggtgttgaagtggaatcgtttcatcccagccatggaggccaccagcaggagtgttcatggggatgtgggcgaggtggggcactttgaaggaatggcggtctgctggtgccctcgaaggggcatccttcctggtcttcgctgacccagaggcgctgtgcctgcatatcatccaccaccaccctagcccagccttcccactgccccaggaaaagctcttctcctggccacctctgccccccagcacctcaaacttgcatggctgggctgtggcctctgcggccaggaagcctgacactaggcaccccccaggcgagagctagtggggtgcagagggccccatgccagacagcccttggggctcgttgcactttaagaaataggatctgtggtgtattccagggggcctgatggacacctttcccgggcgtctgcagctgccctgcccgtgcccgcctgcagtggttggagacgggagtggcccttcggctcccgagctccctctggggacggctggctcactgtctccagttctcaatggccaacgaaggtgcttggaaacacctaaccttgcaagttttaccgccttttgaggaacacaaatcggagaacaaacccagggttcaggcgtgttttctgtgaatgttggatgatgaatttttgtctcttctggtggagctgtgcctggccctgtaggcccagggttggctggaaggtgacatctgtgtttcgttttagctgaggttggcagaaacgttcccaaactcccccagccctggaccccagcagatgaggaaacggccccatttactgaccccgcccccttttcgaggttatgctcacctggtcagctcctcacgtaattgggggtggagggaaagcatggtggtgccctgggccgtccctgtgtgaacgcaggcaaaagcagcccagtccccctcactgcttgagctaacactgccacctcttttgtgtgagcacaaaagccacgtcccaagccacctggcccgattccacagatgtatgtgcggccagtgacttccccaggagtgtggagggggtggtgaggaggagcacctgggctctctacccctctcctcacagaagtacctgaaactaggtctggggcactcccaatgcagcgccttgtcagccaaggtgggcaggcagggactgtggcagcttatgtccaaagggagcccccatgcacaggaagccacagggttcctcttgtttcccccgctaacttcagcctctcatctgctgctccgggctgagggactagaggacatctcggtcgtttgaggggcatggccagtcgtggcaggccggccttcagcgtccggtcagggaagcgtgcagcccaaatgggcacttgcatgggagccacagaggagcgtccctggggattgttgggaccatgctgcccccactcccgcttttgttggggctctaagttctggaaggtgtgtgcacagagggtgctcatgggactcgcatgcagctctcagcactgggtgggagggcgttggcttgtccagaatggggacgtggggcagccacccctgcccagcgagagcgcagacaccgtgtgaggggacagcagcccttggtgcaaagccagagactgatcctggctctgacggctgaagagggaagacccaaggctgggtggcgtggctcgtgaatccacttagaattcttggcttgtgtcgcatactgggtgtcacggcacacatttactctgcattgtccccgtctttcccatcgcctagcgtttggggaggaacagggagagagcttcggggcgtctgtctccgtgctctcctgcctccaccgccttggttttgcttcctgctggaggcagggcacctgctgcgacccagattcttctgcaggatgtgtctgtctttgtcacggtggacagagggtgacatcataggagcagctcgctggccagaaggggatgggggcatccctgtgcctcactcagctcctgctgctcttagggaaaggaggcctgggtcaagccagcatccccttggtaaagacccccgcaggccaccaggcattctggacacgcacacacacacacacacacacacacacacacaaaacttcacagcaggccagctgcagtgacttgtcatcaagagtcacctcagctgcgcccccctcccatcctttcctatgagaagccactgctttgggggcgccggctagaaaaagtagggtgcggtggccaggagggcccctgccgcgcggggggctgggtctggttgagtcgctgctttcccgagggcagcgcagggatccggggaagctgcggcagggagcgggcgccggcttcgtggctctgaggtgtaacgggggtgggctccctccctcggaggacatcgtctgtgtccaggtcagaaagtggcccaggaagggggcagtttctgtcgcgggtccggtgggggcgcggccgcggtgcggtcggtgcagcgtggccaatgcgcggcgcgcgcgggggacagagcaggaggcggtctgtcacctcggccactgctgacctgggctggcctcccccagccctcccgtggcggagccggcagcgatgctacaggcctaagttattgtttgcataaaaagaatcatgttccctgtgtacatttaagaaaaaaacaaaaaaacggaaatgtcagaattgtatggaaataaaacttgtttgaaaatttggaatagtgctgctgccagcttatttttctggtacttgtattttcacatgttaaatgatctttatatatgttgaattaacaaatattttgagtttctgagaaaaaacaaaacatattaatggtattgaaatgtgttagtagtctggctgtgtgcccaaaattctgtttcgcagcaaaagtgaagacctgtatgtaaagaaagtataacaattatttctttgtattttaggggctttaaccggaacatcgtctagctggtgttaggaatgtttgcttaatttccagacttttttttaaaaacacatcgtgggttttttgaggctccaacctgattagtgcatggtcagccctcaatgaaggctgaggcatctctgactgaggtgtttttgtttggttttgttttttaaaatcatgtatttgctacaaagtattgtacttgtctcaatgggaatggtgtaaaaaacaaaaggccttatgtgatctgtatcatagttaataaatgaatcttgtaaaaaaccaaacctgagagaagtgaaggggggcctcctccttaccgggccagtgcagcacacaccagggtttcacaggcttaggcgcccggggggggaagcaggaggctcccacaggagaggcctcggccagcacgagccccccctcccggctctcacctgctttcctctccagcacagcttcccagaaggccgcgtcattcctgtggtttctcagcatcacctaaagtgcctcccacaaacccccatggccgcaggagctgcaggcaggcgtggggaggggatgccagaggtgccgctcctgaccttccttcccactcccctccggcctgaggccacgcgggtggtaccgggagtcagatgcccctgttcacttcctgggtgagttccaggggcagggtcatgagcaggcttgtggccaggaggtggccgacctcagacccttctcaagggaggggtcagggctgaagttctgagaggggagagcctaaggtcacactcactccctggtgctggccctggggtcagagacccaggctctatgccagagttagccaccgtcaccaccgtcatccaggacagcacctccagggacggaggtgggctgcttcccaaagaagccttgccaccaaaaacacctcctctctgctcaccccctaaaaaactctcgttaggaatatcttcctctttccagtctcccaggctcaagtttgctctatccttggccccctccttacttacccctgactgcttctaagatcccaaatgtcacttgagcgtgactctgctgttccctctgcctccattctagcctagacctgaattcaagctcactagactctgatagacacccccacacactgaatggcccccctgccctcaatattcatggcagaagagtgaactattcagcatacaagatgcatccttccctgcctgtgcccatagcagacatggctagctgatcaccgcactctgccacacccctctccaggcagccactgccaatcaataggggctggcaccagagatgacgtctgtttgccactgcctcagccaggcaggcaaacaaacggagatgcctactgaccatagcccaggctccttggcatccatgcagaaccccacgctctgtctggatccatcctgctcttctctcccactcctctaacccaactccccaacatcagtcaaaattagtctttttttttttttttttttttttttttttttttgacagagttttgctcttgttgcccaggctggagtgcagtggctcgatctaggctcactacaacctccgcctccccggttcaagggattttcctgcctcagcctcctgagtagctgggattacaggcatgcaccaccacacctggctaattttatatttttagtagagacgggatttctccatgttggccaggctggtctcgaactcctggcctcaggtgatccgcccacctcagcctcccaaagtgctgggattagaggcgtgagccacctcgcctggccgagtctcattcttttgagtgcagctggctgctttctgcttccagatccttgctttgagcacttccctctgcctgaaattccttccatccacccttccccaaacctctagcctgcccatcagatcctaccctgttcttcaaagccagtctttctccagaaacatccctgaccctctccactcacggattcaccctgcagctgggatttacctgctgggggtttatgtcactccccgtgagcgctccagggtttctcctttgtttttttgaattaaatctctacatcctcctggtgtgcagttggtactcaatgtgtgctgacagaaacctgtcttctctatttttttttttccttttcttagtctgttgtccaggctggaatgcagtggcacaaacacggctcacttcagccttgaactcgcaggctgaagcaatcctcccacctcagcctccaagtagctgggactacagaggcacatgctaccacatctggcttttttttttttttttttttttttttcagagatgggatctcgctctattgctcaagctggtcttgagctcctgggttcaagcgatcctcctgcctcgacctcccaaagcactgggatgacaggcatgagccaccatgcccggcctgttcctcccttctttgggcaaaggctgagccatctgggggccccgctctgtgctaagctgggttgagggagagaccagaaccagataggcagtgggctctgggtgctgactggccaaggagtgtcttttttttttttttagacggagtctccctctgttgcccaggctggagtgtgatggcgcgatctcggatcactgcaacctctgcctcctggattcaagtgattctcctgcctcagcctcccgagtagctgggattacaggtgccgccaccatgcccagctaatttttgtatttttagtagagatggggtttcaccatgttagccaggatggtcttgatctcttgacctcgtgatccacccgcctcggcctcccaaaacgctgggattacaggattacaggcatgagcctccatgcccggacttttttttttttttttttttttttttttttgagacaaagtcctgctctgtcgcccaggctggagtgcagtggtgtgatctcagcttactgcagcctccacctcccgggttcaagcaatccttccacctcagcctcccaaagcactgggagggcaggcgtgagcccctgtgctcagccttctctcgctcttgctcttcaagacttgtgtgctttctaaacacgagcctcacaaccaccagcacccacgttgagagctttggggggcagcttcgcggctcccagataggccaccccaggaggcccaacaagatgccttatgcgtggtaagccttcattcggtttttcgaacgcggtggtctcaaccttgcccttgacctgccccatctgtaaaccaccctctcccacgtgactccagcctagacctccgctgcaagcaaaacatcatatccacctgtctatgacactctacttggggactccactgtgacacacccacagccaaactcctgaccctttctccaaacaggtccattccccaggatccccccctcaagccagagagagaccctgggggcccccttggggtgtctctctcccttccagtcaaccaggtacaactcccagttccattttgccttccagcacactccccttcctgctccctgcaccccagccctgtctgatctcaccaagacatctgccctccatgctcacccactcccatctccatgagggcagatcagatctcacatctagccatgtgtctcctcccgtaacatcctccagggatctccaatgcccttagaggaagcctgaactcttccacagggtcccacccccgaccccgcccacctcccaggagcctttccttgcactctggtccagatactccaactcccctggggcctgcccacctcgggcattttgcagtattgtcccctcctcctccaagactgtcctcccttgaggccatcccaccttgctaactttctcctggtccttcagatttcagctcctcagactcctccacagggaaagccctccctgactcccccagccaagatgggtctctttgctttcagatgagatcgagtgggttcagggtgtatggccgtagactctccgtgctttcaaaggaaaaaaataagttctttcagagtactttctgagctgagcatggtggctcatacttgtcatcatagtgctgtgggaggccaagagaggaggatcacctgagcccaggaattcaagaacagcctgttcaacaaagttagaccttgtctctacaaaacatttctttttttaattagcagcttggggccaggtgcagtggatcacgcctgtaatcccaggactttgagaggccgaggcgggcagatcacctgagatcgggagttcaagacacagcctgagcaacatgaagaaaccccgtctctactaaaaatacaaaattaggagctctccctctccgtctccctctccctctccccacggtctccctctccctctctttccacggtctccctctgatgccgagccgaagctggacagtactgctgccatctcagctcactgcaacctccctgcctgattctcctgactcagcctgcggagtgcctgcgattgcaggctcgcgccgccacgcctgactggttttggtggagacggggtttcgctgtgttggccgggccggtctccagcccctaaccgcaagtgatccgccagcctcggcctcccaaggtgccgggattgcagacggagtctcattcactcagtgctcaatggtgcccaggctggagtgcagtggcgtgatctcggctcgctacagcctccacctcccagccgcctgccttggcctcccaaagtgccgagattgcagcctctgcccggctgccaccccgtctgggaagtgaggagcgtctctgcctggccgcccatcgtctgggatgtgaggagcccctctgcctggctgcccagtctggaaagtgaggagcgtctccgcccggccgccatcccacctaggaagtgaggagcacctcttcccggccgccatcacatctaggaagtgaggagcgtctctgcccggccgcccatcgtctgagatgtggggagcgcctctgccccgccgccccgtctgggatgtgaggagcacctctgcccggctgcgacccggtctgggaggtgaggagcatctctgcccggccgccccgtctgagaagtgaggagcccctccgcccggcagccgccccgtctgagaagtgaggagcctctccgcccgacagccacccagtctgggaagtgaggagcgtctccgcccggcagccaccccgtccgggagggaggtgggggggtcagcaccccgcccggccagccgccccgtccgggaggtgaggggcgcctctgcccggccgcccctactgggaagtgaggagcccctctgcccggccaccaccctgtctgggaggtgtgcccaacagctcattgagaacgggccaggatgacaatggcggttttgtggaatagaaaggcgggaaaggtggggaaaagattgagaaatcggatggttgccgtgtctgtgtagaaagaagtagacatgggagacttttcattttgttttgtactaagaaaacttcttctgctgtgggatcctgttgatctgtgaccttacccccaaccctgtgctctctgaaacatctgctgtgtccactcagggttaaatggattaagggcggtgcaagatgtgctttgttaaacagatgcttgaaggcagcatgctcgttaagagtcatcaccactccctaatctcaagtacccagggacacaaacactgcggaaggccgcagggtcctctgcctaggaaaaccagagacctttgttcacttgtttatctgctgaccttccctccactattgtcctatgaccctgccaaatccccctctgtgagaaacacccgagaattatcaataaaaaataaataaattaaaaaaaaaaaatacaaaattagccaggcgtggtggcgcatgcctgtaatcccagctactcgggaggctgaggtgggaggatcacttgaactcaggaagttcaaggttgcagtgagccaagatcgtaccactgcactccagcctgggcaacagagccagaccctgtctaaaaaaaagaaagaaaaaaaaagtacttttctcggtgtgttattcattcaggctggggcacacagacattaaacaaatccctgcccggagctgacatcctagtggaaggaacacagtaaacaaatgaatgtggccattatttaggcaggaccgaggagttaacgaggattcagttgttgggagcacttgcctcagttgcaaaacttaacagaacacgaaagagacttcagtcatcaacataaaaatatttcagcacaatgttttcaaaaagcaaagttgctgttagcctaatactgctctaaaaaaaaaatgtcagccacgcgtggtggctcatgcctgtaatcccagcactttgggaagcctaggcaggcggatcacaaggtcaagagatcaagaccatcctggccaacatggtgaaaccccgtctgtactaaaaatacaaaaattagctgggcgtagtggtgtgcgcctgtagtcccagctactcgggaggctgaggcaggagaattacttgaacccgggaggtggaggttgcagtgagctgagatcacgccactgcactccagcctgggtgacagagcaagactccatctcaaaaaaaaaaacaatacaaaacaaaccaaaaaaattgtttgtcttggttgggtgcactggctcatgcctgtaatcccagcactttggagttcaagatgggaggatcacttgagcccagcagtctgagaccagcctgggcaatagagtgagactccgactctacaaaaaaattctttaaaaattagctgagcaggccaggcgaggtggcttacacctgtaatccaagcatttctgggaggctgaggcgggtggatcacctgagttcaggagttcgagagcagcctggccaacatggcaaaaccccgtctcgatttaaaatagaaaaattagctgggtgtggtggcgcatgcctgtagttccagctactcaggcagctgaggcaggagaatcgcttgaacctgagaggtggagggtgcagtgagccgagatcatgccactacactccagcctgggcgacagagcaagactccatctcaaaaaaaaaaaaaaagccaggcgcggcagctcacacctgtaatcccagaactttgggaggccgaggcaggcgtatcacctgaggtcagttcaagaccagcctgaccaacatggtgaaaccctgtctctactaaaaatacaaaattagccaggcatggtggtacatgcctgtaatcccagctactcgggaagctgagagagaagaatcgcttgaacccaggaggcagaggttgcagtgagccaagattgtaccattgcactccagcctcagcaacaagagggaaactccctctcgaagaaaaaaaaaaaattagctgggcatggcagcacatgcctgtagtcccagctactcaggaggtcgacgtgggaagatcgcaggaggttgaggctgcattaagacaagattctgccactgcactccagcatgggtgacagagtgagaccccatctcaaaataaataaataaaagtcttttgggccaggcgtggtggcttatgcctacaatcctagcattttgggaggccgaggtgagtggatcgcctgaggtcaggagttccacagcagcctgaccaacatggagaaaccccgtctctactaaaaatacaaaattagccgggtgtggtggcgcatgcctgtaatcccagctactcgggagactggggcaggagaatggcttgaacccaggaggcggaggttgtcgtgagccgagatggcaccattgcactccagcctggacaacaagagcgaaactccatctcaaaaaaagagacttgtttaaaaaatcaaaattagtgcaaaaaaaccaaatccatgatgaacaaactatcaatattttaaataaagacgaatcagtaagagtgtcaagtgagtcacattggagcctgaggctaaaggagaaatcagttaagactgagcctggattctgggagtccagcaaggaggtaactacgatagtccaggagtgaaacggtggcggattagaccagagaaggacggtgatagtggaaagaacagggaattccaggtatcttgaaggtcaaggctacagaatttgttgaagatggcatgagactggggcagagagaaggtgcagatgacgccagggttgccgcatacgacagtgtgagtatctgattatcctttgtcttccccactttcctgtgaaacctacgagggcgggagctgtgcctcccaagccgcagccagcacccagcattcgctccagggctccaggccaactgccctggtggagaatgagctgtgttactccgcgcggccaccaggggtcagcagagcgccgccctgcccagccatggccatcccgggaagagtagaaagcccggatggcggctttttaggaagtaaggccggattagaaggagaagcagcagggactgaggaggaggcgggttctgagaaatggggctggaagcgaagtgtcccaggagctggccgagaagcaggggaatgagctactgtttctgtcactgcatccatccacccatttattccaccattcagtcacaggccactcagggccttgcagagccgggtgagaaactcagtgtgtcctgagggcactggggagacaagactgggtccgatttgcaggagctgagaggaggggaagaaagtagagattcaggacatgcaagctcacagccaacctgcctcccaggtgggcctgaagagcatgcaattaacataaatgttagcaaaacaaataatattggccgggcacggaggctcacacctgtaatcctagtgctttgggaggctgaggtgggaggattgctcgaggccaggagttcgagtctgcagtgagcgacgattgtgctacgcactccagtctgggagacagagcaagaccccatctctacaaaacatacaaaaagttaatcaggagtggtggcgcatacctgtggtcccagctacttaggaggctgacatgggaggatcacctgagtccgggaggtagaggctgcagtgagccgtaatcacatcactgcactccagcctcggtgaaagagtgagaccctgcataaaaaaaaaaaaatacaagtaatattaaattaataaaagctaacaatcattggacccttacgagatagcaggccttgttttaatcgcttttcaccatcaattttctttttctttttctttttctttttcttttttttttctgagactgagtcttgctctgtcacccagggtggagtgcagtggtatgattttggctcactgcaacctctgcctcccgggttcaagcgatcctccagcctcagcctcctgagatctgggattacaggcgcccgccaccatgcctggctaatttctgtaatttttttagtagagacaggtttcaccatgttgactaggctggtcttgaactcctgacctcaagtgatccacccgcctcagcctcccaaagtgctgggattacaggcgtgagccactgcaccaggcttgtgttttgtttttgagacagggtgttgctctgtctcccagggctggagttcagtggcacaatcacagctcactgcagcctcaatctcctgggatcaagggaccctcctgcctcagcctcctgagtagctgggactacaggggtgcaccaccacactcagctaatttttgtatttttttgtagagagggtttcaccatgctgcccaggctggtctcgatctcctgggctcaagtaatcctccctccttggcctccaaagtgttcggactacaggcatgcaccacctcacccctcacccagcccttttcttcttttttttttttttttttttttttgagatggagtcttgctctgttgcccaggctggagtgcagtggcctaatctcagctcactgcaagctctgcctcccaggttcacgccattctcctgcctcagcctcccgagtagctgggactacaggcacatgcccggctaatttttttgtattttaagtagagacggggtttcaccgtgttagccaggatggtctcgatctcctgacctcatgatccgcctgcctcagcctcccaaagtgctgggattacaagcatgagccaccacacccaaccttctttttttttttttttttgagacaagagtctggctctgttgcccaggctggagtgcagtggcgcgatctcggctcactgcaacctctgtctctggggttcaagcgattcttctgcctcagcctcccaagtagctgggattacaaatgtgtggcaccatgtccagctaatttttgtatttttagtagagatggggttttgccatgttggccaggctggttttttgtttttttgttttgttttgttttgttttgtttgagacggagttttgctcttgttgccccagactggagtgcaatggcaccatctcagctcaggctcaccgcaacctccgctcctgggttcaagcaattctcctgcctcagcctcccaagtacctgggattacaggcatgagccaccacacctggttaattttgtatttttagtagagatggggtttctccatgttggtcaggctggtctcgaactcccgacctcaggtgatctgcccgcctcggcctcccaaagtgctggaattacaggtgtgagccaccatacctggccgataaatatttgttgaatgaattcattgaatgctgacagcaactccacgaggaatgccttggggcttgttttcctattatttatctgtgaataagcactctattgagattgttcccacgccatacattttacacgtttaaagttgtgtttagcagagttaggggttttttagtgtattcacagacgcgcaaccatcaccacagtccattttagaacattttcatcacccaaaaagcaagcatgcagccattagcagtcactctccattccccggtattagtttgctgggactgccaaaaccaaggaccgcaaactgggcggcttgaaacaacagaagtgtcttctctcgcagttgccagaggctggaagtccgagatcaatcagggtgtcggcagggctggttgcttttttttttttttttttttttaatttgagatggagtctcactctgctgcccaggctggagtgcagtgatttaatctcggctcactacaacctccacctcccaggttcaagcaattctcctgcctcagcctcctgagtagctgagattacaggtgtgagccaccacgcctggctaatttttgtatttttaggagagacagtgtttcccagtattggcgaggctggtcttgaattcttgacctcaagtgatccgcccaccttggcctcccaagctgctgggattacaggcttgagccaccgtgcccagcctctttctgaggctgtgaaagagaatcagtcagtctgtaatcctagcactttgggaggctgaggcagacagatcatgaggtcaggagtttgagaccagcctgactaacatggtgaaaacccgtctctactaaaaatacaaaaattagccgggcatggtggtgcatgcctgtaatctcaactgctcgagaggctgaggcaggagaatcacttgaaccctggaggcagaggttgcagtgagccgagatcgtgccactgcgctccagcctaggcaacagagtaagactctgtctcgaaaaattaaattaaattaaattaaattaaaattaaaataataattataagcccattacaggccaacataaatattttatgaaaaatatattttccaattaaaaaaaaagttagtgaagggagtggcattcttttacatttttgcaaatctctttaacgtccagcttttatagaagatggctggaccttgggctgggcactgtgcttacgcctgtgatcccagcactttgggaggctgaggtgggaagactgcttgaggccaagagttcaagacaagcctgggcaacatagcaagacctcaaaaaaaaaagaaagaaaaagaaagaaagaaaagaaaagaaaaggaaagagagagagaaagaaagaaagaaagaaagaaagaaagaaagaaagaaagaaagaaagaaagaaagagaaagaaaaagaaagaaagaaagaagggaaggaaggaaggaataacagtaagaagaagatggctgggcctcacggctgcttctgcatttggtctgttgtgatatcacacatcacacagcatctggaaatctccaccagacaacagaatgaagtgaaaaaggcagaaaatgtctcggtatgaaaatttgacccagcacaccgaagagaccagttctcaggtcacattgagaccttctaaaataaacttattttatcttcactatgatgctatgaggtgggtactagaattaaaatatcctcattctacaagggagaaaacgaaggcccagagaggtgaagttacttgcccagagtcatacagcagtaaatggcagagctgaggtttcaacaccaccaattactcttaacctcacaaaatccatgtgtaggccaggcatggtggctcacgcctgtaatcccagcactttgggaggctgaggcgggcaggtcacaatgaggtcaggagtttgagaccagcctgaccaacatggtgaaaccccatctctactaaaaatacaaaaattagccaggcgtagtggtgcgcacctgtaatcccacctactcaggagactgaggcaggagaatcgcttgaacctgggaagtggaggttgcagtgagccgagatcctgccactgcactccagcctgggtgagaaagcgagactccatctcaaaaaaaaaaaaaaaatccgtgtgtatgtgcaatcataaataaatacaggccaggctgggcgacctggctcacgccataatcccagcacattgggaggctgaggcaggaggattgcttgaagccaggagttcaagaccagcctgggcaacatagcaagaccctctctctacaaaactttttttttttttttgagacggagtctcgctctgtctgccaggctggagtatagtggcgtgatctcagctcactgcaacctccgcctcccaggttcaagcgattctccagcctcagcctcctgagtagctgggactacaggtgcacgccactgtgtccagctaatttttgtatttttagtagagatggggtttcaccatgttggccaggctggtcttgaactcctgacgtcaggtgatccacccgcctcagcctcccaaagtgctgggattacaggcatgagccactgcgcccggccaacaaaacatttttaaaaaatagctgggtggggtggtgcatacctgtagtcccagccacttaggaggctaggtgggagaatctcttgagcctgggagttcaaggctgcagtgagtagtgatcatgcagcctgggtgacagagcgagaagactgtgtctcaaaaataattaattaattaattaatggcacaagtgtacctctcatggctggcatagcacctgcccaggctgcacagccaggaagtgctgtcaggagacaggagcccatgatctgagcttgattccttgccctgaaactctagcaagtctctctggggataaataaggatctgttgtctgagaggccactatcaccaggctatatcacttccccatgtctcggtttccctagttgtaaaatgcatctagtaacagagcccatctcagaatcttgctataaaataaagtattagcaaaaaacaagcactcccttaagtgttaactatgaggatcatgaatgagtttgtgtgttgtgagcaaatgcacacgggtgtttgtgtgtgcctcagtttccccatctgcccaaccaaaggccagcgcgtgctccctgcaagcccctgactgtatgcctcttctaagactccctgctccattttctttttcttttcttttctttcgaaatggactctccttctctgacccgggctggagcgcagtggcgggatctcggctcactgcaacctccgcctcccaggttcaagggattttcctgcctcagcctcccgagtagctgggattacaggcgcccaccaccacacccggctaatttttgtatttttagtagagacagggtttcactatgttggccaggctggccttgaactcctgacctcgggtgatccaaccgccctggcctcccaaggtgctgggattataggtgtaagccaccgcgcccggccccagctccattttctttccccatgttaaggtcatgtagaggcttttaagtgcctggagacccccatgccagggaggaccctgagaacgggaagtgggggctgcatggagagaaggagctaggggaactgtaggacctcctatcagactggggaaggcctggcttggacgcctgggttcccgtcctctgtgcgaggtactacaacccctgagttcccatttatgatctaatggggagcttggatgtaagggttcccgtccctgcggcgggggatggagataagacgccaggatcctggtctctggagctccttagagagctggatcctggtccctgacgagggaggtgtatgtcccccttttaaggcgggttgggtttggatgcgaagtcccagccctgtggggggagagtgtgctgacactcaggagttctctcccggaaagggagggtctcgaattctggatttgtgtccctggaggaagcactgacgtgagtcttcactcgtacatggggctcggctgcagggtacctgtcttgtcccgaggggctgctggggcactaactgcctcctgaaggggtgtagacagtgcccggactccgctgttccccttttggagtggggtagctccgatccgaggtgctacattctgacccccgacgttaccgtggggcaagggaactcggaccccagggtagcttggccccctaccagggaaaggcgagcagggcgggtccgggggcggagacgcggcgggcggggctccggcagaccccgcccccgcccgcagcgctggtcgcgcgtctccaagtctgcgaggccgaggtgggcgccgagagctgggcgccacagcccgcgcgtcccgctgcgccccgcgcgccccggggtctatggagctgcccctccgcgccgcccggccggccccacgccgcgcccggagcctgctctgcggccaagtaatcggactggcggtcctgcgggtaggggaagcttgcgggctggcaggagggggacttctgggtcccagaggaatggggggctggaactccagtgtcctgggggatagggggtgggacgagggtatcccgagcctgggggaaggggcgcacggatgtttgagtcctggagaaatctggggttgggagacctggacacgggggtctggggcatctggacacctggctgggaggtttgggggcggcctggttcctggggttagggggtgttctgaacgcctggtcctggaggaatgaagacctaactgaaaacgttaggggatcaggagaccaggacacctgggccccgagtgtcgggtcaatcctgggggcgtcctggggcagaggctgcggcggctgcgtccggggctggggctcgcgcgccggggtcttcagggaggaagttgtggtcgtggggatgtggcggtccgaacacgtggcgccatcccgagaggctggggggatccctgggcaggacacaggatgggggtccctgccctctgccccctgcctccttagcccagccgggaaaacagggtgcagatccggggagtcagacaccggggatgggcttggggggcgggtcctcggggcagagggctccgggggctggggcgtgcgtgcctggcccgggaggcgcccgccccccgcccggcttgggcatgcttggcacgcagcgcgcgggccggttcgatccgtatgcgcgccgcgtgcgcccattggtatgcgggagccggcccggcgcgggcgtgaggcgggcgcgctggcgggcggcgcgggggaggcggcggcggggcacgtcctcacccggagcgccagccccgggccggctagggtgggagctgaggcctccaggtaggggaaactgaggcatcatccaggcccccccccccccagctccttgctgggaccctgagccctgcacggatctcagtttccctagaaggtctcccgagggcactaagcgttgcccctggccccctcccgctgcaggagactcggggctcggagcccgcctgagcgagccccccggagatggcggccccctatcccggcagtggcggcggaagcgaggtcaaatgcgtgggaggccgcggcgccagcgtcccctgggactttctacccgggctgatggtcaaggcgccgtccggaccgtggtgagcaaagccccgcccccctggccgcgggcccccccccgggtccaattcacacccgatgttctgtccccgtgccaaggggcagttcacacccagctccctgacccgccccttagggctagaaggtcttaccttgagttaactaccgtcctgagcccggtcccctgcgttctgcttctagtcccggtcctcagaattcacgcccaacatctttaatctctcgcccttcctcctccttcccaccagaattgacactcgaggttctgtccctgggtcggagtgtaaaatccacactccggtctgctcccacctccagagatgtggaatccactcccaacgtcccgtcccgttcccaaggccccgggaggcggggctcgcccccagttcccaagcccctgagccccggggccccgccgacacctcctccgcgccgcccgcccagcctgcaggcgcagcgcaaggagaagtcccggaacgcggcgcgctcgcggcgcgggaaggagaacctggagttcttcgagctggccaagcttctcccgctgcccggcgccatctccagccagctggacaaggcttccatcgtgcgcctcagcgtcacctacctccgcctgcgccggttcgccgcgctgggggcgccgccctgggggctgagagccgcggggccgccagctggcctcggtgagtgctcatgcgcggggcgagggtcccggggccctccaggcggagtcactgcagcccagatccgggctgcgggcctgccctcgcccagatgcttgtctctggagtcagccaggacctttgcgtgtccctatcaggtggcttctgctctccaagcctcagtttattaaactgtcaaatgggcgcaagaggttgggaagatttcgtgaattctgccctaaacaaggccctggcagttctagtggtcactggtaaatgctattcctatatttttattagaggagaggaatcattattacaaccaaagaaactcccagctgcatgagcgggacagaggggactcaccctggcttgggacgcccattcgctaatgggcgagataccctggatccagacctgaggggccccggcgggaacgcaaggactgtacagtctgagcccccagttggaggagcaagagggagacagtatgatgtggcggatgagatggggaacttcaggaagatgccccagggttcctgtcgccgcgcagccacctcccagctttgcaaccccgggcaggtcgcctcacttctctgtgccttaatgtgaagtgggaaaaaacggtccaacctcccccagggggctgagcagagaatcaaccaggtcatatttgcaaagtccctggaagtgcctagctcagagcaagccaccgctatgcggccaatgctgttatcagcagtaaccttgcagggctgctggaggggttcggggcatggaggagggggcgggggggctgtcgcttttggagcatctcctgcctgtctggcacttttctgagcgctgggattgagcaggagaaacaatctagacaaaagtccctgccccggagcggctggcatcctagtggccaagacgcaataaagaaataggcaaagcaatataatctagaatatgtaaaaatataaactctgtaagatacagataaatatctaagtttattattattactcagactttattattgagacatagaagtgctgttatgttattattacttctattttatgtgtttgttacagctttgcggtgatgaggataaggcagtgtgagtggtgtttatctgaagtctcagggcaccccaggctacccctgtccccacccctccaggagaagagggtgtccttagggtggggttggaggggctccaattcccctcctgccccgtcccaggggaagaggggggagagaaaatagcattgattaagctcgcaataaatcaccatttaaatttaaataatccggcttcccaggcggtaattaggcgaattgactggcgcggagagaatgcggcattagcgccgctgattactgtcattaccgcgaacaacatgtgcgccggcgggggataaacatcttgtctattgtccccgagctgaagggggggaaagggggggctaagagagccccggcggcgtccagccccccattacctggatgagcattccggggctcagaggcatcaggggctggctgaggtcacagcactgacgtggcagagcatggacttaatcgatcccacctcgaccacggtgccaagtggaagtagggtcaggacagtgtgggggggcttggtactgcgtggactcctatagtcccaaaactgggaaatcgggggacagaggcatttctagctctacagggtccctaacaagaggcgaagcacctgcttccatagttcagaggaggagctgaggacagcattttagctgaagccacagagcagagcactgtcagtcacactctctgaaggggaggggactcccatgccctcctcagtaataagccgggcaccatggctcacatccgtaatcccagcactttggggcgccaaggtgggaggaaagctttgggccaggagttcgagaccagccagggcaacatagcaaaaccctgggcaatataacaaaaccatgtccctacaaaaataaaaatattggctgggcacggtggctcacacctgtaatcccagcactttgggaggccaaggcgggcagatcacgaggtcaggagttcgagaccatcctggccaacatggtaaaatcccatctctactaaaatacaaaaaattagccgggcgtggtggtgtgtgcctgtagtcccagctactccggaggctaaggcaggggaatcacttgaacccaggaggcggagattgcagtgagccgagatcacaccactgcactccagactagtgacagagcaagactccatctcaaaaaatatataaaaataaaaataaataaataaattagccaggtttggtggcacccgcctgtagtccctgatactgaacaggatgaggtgggaggactgcttgagctgaggaggtcgaggctgcagtgagccatgatcatgccactacactccagcctgggcaacagagcaagactcagtatctaaaataataacaataatagtaatcatatagaatgcatgcatcagaccctgggataagccctgtatacaaaatgactttcttggccgggtgcggtggctcacgcctgtaatctcagctctcagggaggcaagaggcgggaggatagcttgagcccaggagttcgagacctgcctcggcaatatagcgagaccccgttctccagaaaaaggaaaaacaacaacaacaacaaaagataaaatgactttctttttcagagggaggcactattatgattcccaagttacagaagtgtgtgcccaaggtcgcacagctgggattcaaacacagatgaccttgccccaaaggccgcctctcaaccatcatatgtggtctgtaggtctacagggatgggttctaggtctctgcctctctgggcctcagtcctccatctgtgaaatgggacaacagatgttcaagtctagccctgagcctctgagtctggagaggagaccgcccaaatctcatgtcagcattccctattgctttttttttttttttttgaaacgcagttttgctcttgttgcccaggctggagtgcagtgttgcaatctctgctcactgcaatctccgcctcctgggttcaagcaattctcctgactcagcctcccgagtagctgggattacaggcgcctgccaccgcgcctggctaattttttgtatttttagtagagatggggtttcaccatgttggccaggctggtctcgaactcctgacctccttatcctcccaaagtgctgggattgcaggcgtgaggcgccgtgcccggcttttacagccttctttcttcccatagcacttattgtcatctgacactctctgtatttatcttgttattttgtgtcattcaccaacagcctcttggttgctgagcctggagtagcatctgggacacaatgaaggcttactaaattgttgagtgactgtggcagttgagggaaggaggggtgacatctttatttatttatttatagacggagttttgctcttgttgcccaggctggagtgcaatggcatgatctcggctcactgcaacctccttctcctgggttcaagcgattctcctgcttcagcctccctaatagctgggattacaggcatgcgccaccacgcccagctaattttgtatttttagtagagatggggtttctccatgttggtcaggctggtctcaaactcctgacctcaggtgatccgcctgccgcagcctcccaaagtgctgggattacaggtgtgagccaccgcacccagccctttttaaatttttttgaaacagggtcttgctctgtcgcccaggctggaatgcagtggtgcgatcttggctcactgcagcctccacctactaggctcaagagttcctctcacttcagccttccaagtagccaggactacaggcacacgccaccacgcctagctactttttgcattttttaagagacgaggtctcaccatgttgcccaggctgctctcacattcctgggatcaagtgatttgccaaccttggcctcccaaagtgttgggattacaggtatgagccactgtgcccagccaaggggtgacttcttagctcataggtcaggcacatcctcgctgaggaagtaacgtttttttgtttttgttttttgttttttttgagacagagtcttgctctgtcacccaggctggagtgcagtggtgcgatctcagctcactgcaacctccacttcccaggttcaagcgattctcctgcctcagcctcccaagtagctgggttacaagcacacgccaccatgcccagctaatttttgtatttttagtagagacagggtttcgccacgttggccaggctggtcttgaactcctgacctcaggtgatccatccacctcagcctcccaaagtgctggggttacaggtgtaagccactgggcccagccaaggaagtgatctttgagctgaggctccaaggaggtgtgggagcagctgtgagaaaagctggaagagagtgactcagcagagggaacagcaggtgcaaaggccctgaggcaggtggggatcagcttgctgggtgcagagcctcatgcactgtggtaggggtttggctgttacccacagtgagaggggagccacagaggtggtgagggcggaagtaggagcccagtgaggatgaggacgtggtggtccagccagggcagctagactgggctggggccatgggtggtggaacacaggtgacatggtcaggtccaacccctgggacttgcttaaaatgcatgtgggtgtgagagacacagagggcggcctccaagaaaccgcccgaaaaggcagtggtgccctgatgttatctgtagtcatactgaaaagaaaagtgcggccggggcggtggctcacacctgtaatcccagcactttgtgaggccgaggcaggtggatcacctgaggtcaggagttcaagacaagcctgaccaatatggtgaaaccccgtctcaactaaaaatacaaaaattagccgggcatggtggtggtgcctgtactcccagctacttgggaggatgaggcaggaaaatcacgtgaaccaggaggcagaggttgcggtgagctgagatcctgccactgcactctagcctgggtgtcagtgctagatgccgtctcaaaaaaaaaaaaaagagagagagagaatggtggcatgactcccagtattaggcacctactgtatgcactagcccattcaactctatcactgtagacccattttacagatgaggctgaggaaagtaaaggcaaaggtgacccggcactgccccaccccatggtgcttgcccccatgcagccctcaggcctgcggcgctttgacgatggggcatgtgagggacccctctccccgacttccctgggtgatgaagccccagcctcttctctccaggacccagggtcagcacattccttcagggcagttgagaagggcaggtgacgggggagatctgggaacttggaagaggccttggcttctgccttctgcccctggatccccctctctctgccccaggtcccccctctctctgccccaggtccccccacactctgcacccggtttccccctctctctgccccctgggtccccctctctctgcgcctggtctcccttctctctgcccctggtctcccgtctctctgcccctggtctcccgtctctctgcccctggtctcccatctctctgcccctgttctcccttctctctgcccctggtctcctgtctgtctgcccctggtctcccttctctctgcccctggtctcccgtctctctgcccctggtctcccgtctctctgcccctggtctcccgtctgtctgcccctggtctcccttctctctgcccctggtctcctgtctgtctgcccctggtccccttctctctgcccctggtctcccgtctctctgctcctcgtgctccctctctgcgcaagagatgaggacactgagcaggctgtgataagaaccacagcaagtgtttgttaaatggatgagtgatgtttgggttctggacatgggagggcggatgtggaagtggtgaaaagtctcctgctgaatgtgggggacagaggagtggggacattttgaggggagagggagaggaggaaacagcgggaggcatcggggagttggtgggatcgggaggtggaggctgggggtaaaaagacacatcagtcagtgatcaggagactctgggggtccctttcacaggggaccggacccgtgtatggggaagagcaggtccccaagcccccccaccaccacaccccctaatcccgacgtgcccattaatgttgttaattgcagcggttcagtctgacccaggctgatcctgggagagggaaaatgaaggaattagcaaaaatgacaggggaaaattgcgacaattagcaggcagcattgttcctgcctgtcacccggctggttccgagctgtatcttgagggagggggtccccgtcaaccccccagccccccagtaattgttcctggagctccaggcggaggtggaggcagggaggaacagccaggagggtgtggggtactcctgggaggaggaagctcagcccagacactagggggctggggaggcgggggctgcgcgcccatgggggaggggcggggtttcgccgcctggtgttttgatggtcgggtaataacaatagtaatcacactattaataccagtcccggctctgtgctgcagcatctgcttctgccaggccccagccaggcccttctgtctgttaagtggactgaatgcgtaaccagcctggggagtcaccgctcctggcaaacccgcttgacagaggaggaaactgaggcacagagcggcagagaggctggtcccagggcacacagccagggaggggaagcgctggggcctgacaggagacctggccccttagccccataggaaaaaggcacttggggaccctcaaggtcaccaagtctctcccctggctccccactctcagcactgggttggagctccctcgggggttgtcctctgcagggtcagggtcacccaggggtcctgggtggggacaggctccgggacccccaggtctctgcctacccccagcacaaggtccagggtcctagctcctgactgtagggaggatggggcagggggcacaggtctcactttgtcttggtctcagttgccatctctgtctctctctgcatctcttttcctctgtctctccatgtctatttttttttttagtttttgtttgtttgtttgtttttgtttttatttttgtttttttgagatggagtcttgctcttgctgcccaggctggagtgcaatggcacaatctcggctcactgcaacctctgcctcccgggttcaagtgattctcctgcctcagcctccagagtagctgggactacaggtgcacaccaccacgcccggctagtttttctgtagttttagtagagacagggtttcactatgttggccaggaaggtctcgaactcctgacctcaggtgatctgcccacctcagcctctcaaagtgctgagattataggcgtgagccactgcacccggccttagtatttttatttattattattattattattgagatgcagtttcactcttgttgcccaggctggagtgcagtggtgggatctcagctcactgcaacctccacgtcccgggttcaagcaattctccctcctcagcctcccgaatagctgggaccacaggcacatgctaccacacccagctaattttttgtatttttggtagagacaaagtttcaccatgttggccaggctggtcttgaactcctggcctcaggtgatccacccacctccgcctcccaaagcactgagattacaggtgtgagccacagtgcccggcctccccattttatttactcattcatgagttggacatttgtgtgctttccaccttttgaatgatgtgaagtatgctgctatgaacacgcatgtacatgctacaacgcctgttttcaattcttttgattacatagattacatacacagaagtggatttgctaactcgtatgataattccatgttaacttattgagaaaccgtcaaattgttttccacagtggctgtacaattttacattcccaccagcaatgtatgagggttccaatttcaccacatccttaccaacacttactttctgtgttttttgttttgttttgtttttgtttttgtttgtttgttttttgagatggagtctcgctctgtcacccaggatggagtgcagtggtgtgatctcagctcactgcaagctccacctcctgggttcaagggattctcctgcctcagccgcctaagtagctgggattataggtgcacgccaccacgcccagctaatttttatatttttagtagagataagatttcaccatgttggccaggctggtctcaaactcctgaccttgtgatccacccgcctcggcctcccaaagtgctgggattacaggcatgagccacggcgcctggccactttctacttttttgatgctagccatcctagcgggtgtggagtggtgtctcatagtggttttgattttcattttcctagtgactaatgatgttgggcatcttttcatgtgcttattggccatttgtgtatcttctttggagaagtatctattcaagtcctttgcccatttttaaaaatatattttttgtagagatgggggtctcactgcattgcccaggctggtcttgatctcttgggttcaagcaatcctcccacctcagcctcccaaagtgctgagatcacaggtatgagccaccgtgcctggccctttgcctttttttttttttttttttttttttttttttgtctgagacagagtctcactctgtcgcccaggctgcaatgcaatggccctaactcagctcactgcaacctctgcctctgggttcaagcgatttatcctgcctcagcctcccgagtagctggaattataggcacccgccatcatgcccagctaatttttgtagagatggggtttcataatgttggctggtctcgaactcctgacctcaggtgatccacccaccttggcctcccagagtgttgggattacaggcgtgagccaccacactgggcccctttgcccatttttgaattgtctttttgttgttgagttgtagaatctctatctctttctattcctttatatccctctgtctctgtctttcagtctcctctctgcctccttctcatccttcaggtctgctcaaatgtcccctccttcaacagccctaactccattactctccattttgcaccacctatttcattctccatagcactggccacaaagggtaattccatatttgttagtttctttgtgtgtgtgtgttttttttttttttttttttaaacagacggagtctcactttgttgcccaggctgcagtgcagtggcgcgatcttgactcactgcaacctccgcttcccaggttcaagcgatcctcctacctagcctcctaaatagctggaattacaggcccacgccaccatgcccagctaatttttttgtgtttttagtagggacggtttcaccatgttgcccaggctggtctcaaactcctgacctcaagtgatctaccctcctcggcctcccaaagtgcttggattataggcatgagccacctcgcccagcctgttggtttcttttctttctctcttttttctttctttctttttttttttttgagatggagtctcgcactgtcatccaggctggagtgcagtggcatgatctcggctcactgcaacctctgcctcccggtttcaagcgattctcctgcctcaacctcccgagtagccaggactacaggcgcccacctccacacccggctaatttttgtattttcagtagagatggggatccaacatattggccaggctggtctcgaacccctgaccttgtgatctgcctgcctcagcctcccaaagtgctgggattacaggtgtgagccacctcgcccagcctgttggtttcttatttatttatttttatgggatccctaagcagagatgttagtttcttgcttgctgttcaactgcccctggtctgagagcccagcaggaggcaggggttgctgggctgtcctggtcaccgttgcactcccagcaatgcctagtgcaggacatagggagggtaggtattcagggagcttttgtgagtgaatgggtggatgaatgaatgagtccctctatgcaccccctggcccgtctgtctctgtgagtcagtctgtcactcactgtcccacccacctgtgtgtcccacgccccaggtctctcccccatgggtgcccagataccccaagatgtctacaagccttaggggaagagagggaggtttgtagactggctcccgggggacctgccctgggcagggtcagccagactaacaggcttcatccttccatctgccccagccccaggccgccgcggccccgcagcgctggtctccgaagtcttcgagcagcacctgggaggtcacatcttgcaggtgagtgaggccccttccctgcctgccgctccttgctaccacctagcggccgcctctggagaacagcagcctcttcagcatccatctattgtggggggtacctggactgggaaggcgaatgctcaagatccctccactccctgccccttccgaggaccactgaagccccctccccaccaaaacagtccacctcaggtggagacccaggtttcagaacctcttaccacttggcggctggacagagggacaccgggtcctctccttccccctccctgtctctcccggctctagtccctggatggctttgtgttcgccttgaaccaggaaggaaaattcctctacatctcagagacagtctccatctatctgggtctctcacaggtaagggacccccagtggacctggattggctcagccaccatctcccttgccaggcctatgcatatccttcctctctcctggtctcaccatagcagcaagaaaaatggactggatctctgtggtccccaaagtgtgttccttggcaccccacatggcacccagcatggttcatccttgaaggcagaggagggctattgttttttgtttgtttgtttgtttgtttttgagacggagtctcgctctatcacccaggctggagtgcagtggtgcgatcttcgctcagtgcaacctccacctcccgggttcaaacaattctcctgcctcagcctcctgagtagctgggactacaggcgcccaccacacccggctaactttttgtatttttagtaaagatggggtttcaccatgttagccaggatggttgagatctcctgacctcgtgatccacctgcctcggcctcccaaagtgctaggattacagtgtgagccactgtcctggctgatgagggctatttttttttttttgagttggagtttccctcttgttgcccaggctggagtgcaatggtacgatctcagctcactgcaacctctgcctcctgggttcaagcgattctcctgcctcagcctcccgagtagctgggattacagacatgcaccaccacgcctagctaactttgtattttttaaatagagacagggtttcttcatgttggtcaggcttgtcttgaactctcaatctcaggcaatccgcctgcctcagcctcccaaagtgctgggattacagcgtgagccaccgcgcccagcctgagggggctattaaagtaacaagtagatctgaggaaagcaggttcactgaaagatcagtttgccaatgactggcgggccagatgcaccatatttgccaacacttgtttcttcttaacaattttaaaggtttagaggccacccacgctggctcatgcctgtaatcccaacactttgggaggctgagccaggaggatcacctgaggccaggaattcaaaaccagcctgggcaacatagtgagacaccccaccacccccacccccaccatctctacaaaaaaacttaaaaattagccaggcatggtggcacactgttgtcccagctactcaggaggttgagatgggaggatcgcttgagcccatagggtcaaggtggcagtgagccatgatgaagccactgcactccaacatggacaacaaagtgaggctatgccttaaaaaaaaaaaaaaaaaaaaaaaaaaaaaaaaaaaaaaaaaaaaaagggccgggcgcggtggctcacgcctgtaatcccagcactttgggaggccgaggcaggcaaatcacctgaggttgggaattcaagaccagcctgaccaacatggagaaaccccgtctctctactaaaaaacaaaaaatacaaaattagccaggcgtggtggcagacacctgtaatcccagctactcgggaggctgaggcaagataatcacttgaacccaggaagtggagggtacagtgagccgagatcgtggcattgcactccagcctgggcaacaagagcaaaactccgtctcaaaaaaaaaaaaaaaaaaagggcaggaagacctactgaaagccccatccttggagccctggcatctcacagcaccttaagctttgccagtccctccaatacaaattgctatcaactttgatcatttttacaaatatttttcacaaataggaaatttaggaaattcagtgcattggcaacttgtgagtaccttttcagtgagattcctggaggaggaagacaccaaaaggaggggaatttggacaagaggacgggagggaggaagagtggaggaaaagcttggccaggtgtggtggctcacgcctgtaatcccagcactttgggaggcaaaagcaggcagatcacctgaggtcaggagttcgagaccaacctgggcaacatggcgaaacccagtctctactaaaaatacaaaattagccgggtgtgctggcagatgcctatagtcccagctactccagaggctgaggcagaagaatcacttgaacccaggaggcagaggttgcagtgagccaagattgcaccattgcactccagcctgggcaacgagagcaaaaccccatctcaaaaacaaaacaaaacaaaaaaagtccaggcgcggtggctcatgcccgtaaacccagcactttgggaggctgaggcgggcagatcacctgaggtcgggagtttgagaccagcctgaccaacatggagaaaccccgtctgtactaaaaatacaaaattagccaggtgtgttggcacatgcctgtaatcccagcttcttgggaggccgaggcgggagaattgcttgaacctgggaggcagaggtcacggtgagccgagatcgcgccattgcactccagcctgggcaacaagagcaaaactccgtctaaaaaaataaaaagaagaagaagaagaagaagaagaagaaggaaaggcttgaagctgttgaagctggcgtgggggaggatttaatgagggggcggagcccagagggataacggactgagggaagcatgtgacctccaagctgaggggcaatgggagtcatggcagccatggtggtcaggtaagtaacttgcagaggcatctttgaactgtaggtcagaagaccagtgaggacgcgggggcagaaacacagtggggagaagatgggggcctgcattgagggaggcagggagagaaggggactgctaggagagagatttacgggtagaattgaatgtaaaagtgtctgattgaaaagctctaactctttaagagcttaaaaaccactcccctgtttgtatcttgaatctcattcctgctgggacacccagtgattcatgccagggcacagttgtttgctgtatgggggtggtagtgagtaagcaggagttgggtaaacggaggttctgacacctcccacccacgccccactcccacacacagccccttaatagagtgggcggggaaaaatccttactaatcactgggtatgaagcgagaagagtctaagtttgtatcttccgtttgaaaggtaattgttttttgtttttttcttttcttaaaaaaacacactggcatgaagcgcacctgcgtgcaggcaaatgaggcaaggctgagcccagagggcgagcgagttactgcgcgcgcacctcacccgccccctgcattcccctccttcgccggcaggtggagatgacgggcagcagcgtcttcgactacattcaccctggggaccactcagaggtgctggagcaactggggctgcggacgccgacgcccggccccccaaccccgccctccgtctcctcttcctcctcctcttcctcttcgcttgcagatacccccgagatcggtaattctaagggctcctaaagaatgaagtctgagggtagatcgggggacgcccgctgtactgtatccagccatgccgcgtttatacaaatagcagtgaagttagaactgtgtagaacgaatctttgcaaaaggaatcggagtataaattgaggcggtgagacttggttccttaagcttgccaaactcccaaagattcgagctacagaaagacccccctggctgctgaaaggagttgggagaggcttaggtaaataacaaggcaggcttattgggaatatacaccggctgtgtctgtaagtgcacaatcacattacataattacgttagggccgggcgcggcggctcgcgcctgtaaccccggcacttcgggaggcccaggggggcggatcacttgagctcggttggagaccagcctgggcaacatagtgaaacctcatctctacaaaaattacaaaaaaggccaggagtggtggcacaaagctgtagccccagcactttgggaggccgaggcgggtgggtcacctaaagtcaggagtttgagaccagcctggcttgcatagtgaaaccccatctctactaaaaatacaaaaaaaaaaaaaaaattagctgggtatggtggggggtgcctgagtcccagctactcgggaggctgaggcagaaggatcacttgaacccaggagatggatgttgcagtgagcagagattgtgccactgcactccagcctgggcgagtccaagactgtctccaaaaaaaacaacaacaacaaaagaaagaaaaaaacattagctgggcatgatgacacatgccagtggtcccagctacttgggaggtgggaggatggcttgagccttggggacagaggttgcagtgaggagatcacgttgctgcactccagcccgggtgacagagccagtgtctggaaaaaaaaaaaaaaaaaggctgggtgcggtggctcacgcctgtaatcccagcactttgggaggccgaagtgggcggatcacctgaggtcgggagttcgagaccagcctggccagcatggtgaaaccccatctctactaaaaatacaaaaattagccgggcgtggtgcaggtgcctgtgatcccagatactcaggatgctgaggcaggagaatcgcttgaacctgggaggtggaggttgcactgagccgagatcaggccattgcactctgagtgagactccgtctccaaaaaaaaaaaaaaaaaaaaaaaaaaaaaattgcattagatcctaagcgcaggcccacaatgcaagaagtgttatctccattttacatcagaaaactgaggcacggcgcggagaggttaagttaattgcccccaggtcacacagctataagtgattgagttggattctagcccaggtctgtctgttccggggtcagcacgcctaacccttctctccagtggaaatttccactcccactgtgtatgggagggagggtgctgcagattaccctgccggctctttttagctctgagatgttgggggcctatgaggctaactatcctgtaaataggattttccaatcttgggtttgcttaacaccaaaaacatctgagacatcagctgtgcttgcaagcgtggggcgaagtctgcaacacgtgcaggctgttggggagtgggactgtgtttgtacctgagttttaggcacagggtcatctgtgtgtgagcatatttttaagaccgttttgtaggggttacagaaggatctggatttgtgagtcttatttattgctattccccaatcccctgttctgggccagcccctgtcctggtgacataggagtgaccatgacagctccagccccacccacctggggctcccagtccagtgaggggagaccaacctgtcctcagacagtggcaacccagatggggcagggctgggataggggaacccagaggggatggctgacccagcctgagggtcagggagggcttcttggaggaggagaagtctgtgctgagacctggaggatgggtcctgagaggtgggctttcctctcaaggcctcaggaagctatggcaggttcagagcaggggagggtggaggcacgtttgagcattagaaagacgtagatggggccaggcgcagtggctcacgcctgtaatcccagcactttgggaggccgaggcggccagatcacgaggtcaagagattgagaccatcctggccaacatggcgataccccgtctctactaaaaatacaaaaactagctgggcatgatggcgcgtgcctgtaattccagctactcaggaagctgaggcaggagaatcacttgaactggggagacggaggtcgcagtaggccgagatcgtgccactgcactctagcctggtgacagagcgagactccagctcaaaaaaaaaaaaaaaaaagacatggatgggaccagacatggtggctcacacatgtaatcgtagcaccttgggaggccaaggagggcagatcccttgaagtcaggagttcaaaaccagcctggccaacatggcaaaaccccgtctctactaaaaatacaaaaattagtcgggcatggtagcatgtgcctgtaatcccagctacttgggaggctgaggcagaagaatcacttgaacccaggaggcggaggttgcagtgagccaagattgcgccattcactccagcctggacaacagagtgatattcagtctcaaaaaaaaaaagaaaggatgcggatggctgccacataggggagcccacatactgtccccatgagctttcaaaatcatcaggcatgcctctgagtgcggccgtggcccagcggacatcttgtgtctatgtccggctggctctgcaagggtcagggtggcctgtgtgtttcctcttcaggaccccataaccttccttcactctctgtcccagaggccagcctcaccaaggtgcccccctcctccctggtccaggagcgctccttctttgtccgcatgaaatccacgctcaccaagagggggctgcacgtcaaggcctcagggtacaaggtgggtgtgagcagtcaggctcctgtattccaggcagccatgtccccagattgagggtgaccgagggaaccaggctggtggcttcactggctgcaggtggcttagggaactgggtctgggaatgggactgggggggtcacacagtgtccagtcctccagcacctgtgggggacagagggaacccagcccagtgatggtcctcttgcccccactggcccgccttgtccctcctccaaccatgcccaccaccagcaggtcatccacgtgactgggcgccttcgggcccacgccctgggccttgtggccctcgggcacacgttgcccccggcccccctggctgagctgccactccatggacacatgatcgtcttccgtctcagcctgggtctcaccatccttgcttgtgagagcaggtaccggggttgggggctgtggcgggtggattgggggcacaatggagatctgggggtacatggggagtcagagggagtgctgggtctgcaggatagggcactggggagccatgggaggcggaacagcaatggatgggacagggtgatggggagaagggagggaaggcaggggaccagggcggaggcctagcccaggggtgccttcggggatggaagaggggctgtgtcttgggtccgggccctccttctggggctgcagatcttggcccgtctctggtctttcatttctcatttctctggtctttcatctctcatccatttcctctcctgcatcccgcagtggaggcaaattaagtgctgaaatagtcccatgctctgaggtgtccagggtgcctagggccttgccactagcatccacgcgaatactcgcagctgccccgggagagacactgttttgtggtttgtttgtttgtttgttttgagatggagtctcactctgtcaggctggagtgcagtggcgcaatctcagctcactgcaacctccacctcccgggttcaagtgattctcttgcctcagcctctcaagtagctgggattataggcgtgcaccaccacaaccagctaatttttgtatttttagtagagacggggtttcaccatcttaggcaggctggtctcgaactcctgacctcaagtgatccacacgcctcagcctcccaaagtgctgggattacaggtgtgagccaccgcgcctgccaacactgttattgcacccattttacagcaagggtgtgaaccccaggggactctggagccaactctgcctctcccccaaccccgtggtcttggactcctcccctcttctctgtcaccccccagagtcagcgaccacatggacctggggccctcagagctggtgggccgcagctgctaccagtttgtccacggacaggacgccacgaggatccgccagagccacgtggactgtgagacccacctccacccaccaagcctgcctaccaccccccagacccgagcatcccactccctggtccctggaagtccttcttcagggctgcccacagtccctcctgctgcacctacagctccagggactccgtttagcattggaagagcagcaaggagactgagtgatgcctcaggatgtgtgtgtggggggggggtctggggggctgtggggtctccaaaacacccaagaggcctcgctgctgggctacctctcagtctctctgactctgcctctctgtgctttcacctttttctcttctccccaccgtctccctgcccactcccctgctctcactcctcctgtctcctcctgtctacctggctctctgtcttgcccctgtccccaccccacccccttcccatctctccctgggctgggcccagtgctggacaagggtcaggtgatgactggttactaccgttggctgcagcgtgccgggggcttcgtgtggctgcagtctgtggccacagtggctgggagcgggaagagccccggggagcaccatgtgctttgggtcagccacgtgctcaggtgagggctgtgcccacccctcctgcagggcactcagggccctgctgtctctccccacctccagtgggggtgctttggggagggcttctagaatgggacaagcccagggggtctgcagacacgaaggggaaggaggggaggatggtgagagcagaggcccagagtggaacggtcttgctggcaggagacagagaggagtcgccagggggagggggacagtatctttgaggaaggcaggggcaggctcacagcctcctcaggctcaggtggagggtctggactcttgactctggggcactggcgagccacggcaggctcttaccaggggaggcccacagagcacagcaactaatggaaagaagcagggaggggtgttccaagcagaggaagggctccaagcaacagcctgaccctaaaggtaatgccttgggctggagtagaaagcagtgagaaaccagcctgaagatgacggcctggccttttggctcaggggcactggggagtcatagaaagctttagagctggagaggatcatagtcagatctgctttttagaaagactgctctagaccggacatggtggctcatgcctgtaatcccaacaatttgggaggccaaggcaggtggtttgcctgagcccaggagctgaagaccagcctgggcaaccaagtgaggtcccatctctattaaaaaaaaatttttttaattggcccgttacagtggcacgcacctgtggtcccagctacagcagaggctgaggtgggaggatcacctgagcccaggaggtcgaggctgcagtgagccgtgatcgtgccactgctctccagcctgggcgacagagtgagaccctgtctcaaaaaaaaaaaaaaaaaaaaaaaaaaaaggaaaaaacacccttctaggccaggcacagtggctcacgcctggaatcccagcactttgggaggccgaggtgggtggatcacgaggtcaggagttgaagaccagcctggccaagacagtgaaacctcatctctactaaaaatttaaaaaaaattagctgggcatagtggtgcacgcctgtaatcccagctactcgggaggctgaagcaggagaattacttgaacccgggaggtggaggttgcagtgagccaagatcatgccactgcactccagcctgggcaacacagtgagactccatctcaaaaacaagcaagcaaacaaaaaaacccttctagctgccatgaaggaggcactgagggacaagatgggcgctggaggaccagggcagaggctggggccagtcctgggaagtgccagactctatgggggaggaggggaggagaccatcttctgcccaggtctctggctttgctgagcccggatttgggctcctgagaggaacagcaggtttgaaaggaagatgtagacatcagatgggcatgaggtgccagaggacacccaggtggtgacatccaggtggccaccggctatccaggtctggccttaggagcgagggccacgctgggctagaagtcaacccggagtttagggatctggtgttgagccttgtaagtgcctcagggtggggactccacatttccccgtgggagtgtccacacattgccacaagttgggtaaagcaggagggagtcctgagaggccaaggacccctggctcctaaccgcatccatcttctccccagccaagccgagggtggccaaactcctttggatgccttccagcttccagccagcgtggcctgtgaggaggcatccagcccggggccagagcccacaggtgagccccacctcccaccttggcccctgggaagctccaaggaacctttgggtcctggctgtccattccagaagccactagccacatgcagccatttatatacaattaaaattaaaatccaggccggtgcggtggctcacgcctgtaatcccagcactttgggaggccgaggcaggtggatcacgaggtcaagagatcaagaccaacatggtgaaaccttgtctctactaaaaatacaaaaattagctgggcgtggtggcatgcgcctgtaatcccagctacttgaaaggctgaggcaggagaatcgcttgaacccgggaggcggagattgcaccactgcactccagcctagcgacagagcgagactctgtctcaaaaaaaaaaaaaaaaaaatttaaatccaggccaggagtggtgactcaagcctgtaatcccagtactttgggaggccgaggcaggcagatcaccaggtcaggagatggagaccatcctggctaataaggtgaaaccccatctctactaaaaatacaaaaaaattagctggacatggtgccatgctcctgtaatcccaactactcgggaggctaaggcaggagaatcgcttgaacccggagggcagaggttgcagtgagccgagatcatgccactgcactccagtctaggtgacagagcaagatttaaaacaaaacaaacaaacaaaaaattagctgggcatggtggcacgtgcctgtagtcccagctactcaggaggctgaggcaggagagtcgcttctacccaggagtcagaggttgcagtgagctgagatctcaccgctgcactccagcctgggtgacagagtgagactccatctcaaaaaaataaaataaaataaaatccaggcccggtgtggtggcttatgcctgtaaacccagaactttgggaggctgaggtaagagaattgctttagcctaagagttcaagacaagcctgggcaacatagtgagaccccatctcaacaaaaaattttaaaacttagccaggtgtgatggttcacacccatagtcccagctactcgggaggctgaggtggtaggatttcttgagcccgggagttagaggctgcagtgcgctgtgacagctgtactgcactccagcctgggtgacggggtaagacctcgtctcaaacaaatttatttatttttttagggggatggagtttcactcttcttgcccaggttggagtgcaatagcacaatctcggctcactgcaacctccgcctcccgggttcaagtgattctcctgcctcagcctcccaagtagctgggattacaggcacctaccaccatgcctggctaatttagtatttttagtagagacagtgttttgccacgttggccaggctggtctcgaactcctgacctcaagtgattctcctgcctgggcctcccaaagtgctgggattacaggcatgagccaccatgccctgcaaaacaaaacaaaacaaaaaacactttaaatccatgtcctcactcacacctgccacatattgcatgcacagtggccacatgtggccagtggctgcttcgtgggacagtgtggatgtagaacatttccattaccacagaaagctctatcctggaaacttccactgaagagcacaggtctagaccagggtatcttgatctctgctctactgacattttagggccaggtgattctgtgttggaggggacactgtgggatgtttattttacagcatccctggcctctaccctctagatgccaatggtgacctccccagggctgtgacaccccaaaatatctccagatattgccaggtgtctcctggtgacagaaccagctggccgggcacagtggctcacgcctgtaatcccagcactttgggaggctgaggcaggcagatcacctgaggtcaggagtttgagaccagtctggccaacatggcgacaccccatctctacttaaaatagaaaaattagctgggtgtggtggcacacacctgtaatcccagctactggggaggctgaggcaggagaatagcttgaaccccagaggcggaggttgcagtgagctgagatggtgctggtgcactccagcctgggggacagagcaagactccgtctcacaaaaaaacaaaaaacaaaaacaaaacaaacaaacaaaaaaaaaaaccccactcccagctgagaactacaggtctggcccactaagcacagctccattccacagatgggaagactgagggctggggacacacacaggccctcagcatcttcctcttccagagccggagcctccgacggaagggaagcaggctgccccagcggagaacgaggccccccagacccagggcaaacgcatcaaagtggagcccggcccgagggaaaccaaaggctccgaggacagtggcgacgaggatccctccagccacccggccacaccgaggcccgagttcacctctgtcatccgggcaggggtcctgaagcaggatccggtgcggccatggggcctggcgcctcccggggaccccccgcccaccctcctgcacgcgggcttcctgccgccggtggtgcggggcctgtgcacacccggcaccatccgctacggccccgcggagctgggcctggtgtacccgcacctgcagaggctgggtccgggccccgcgctcccggaggccttttacccgcccctgggcctgccctacccggggcccgcgggcaccaggctgccgcggaagggggactgaggactggcagagctgccggcgccggaccctgcgacaaccggggtcccccaggacagtaggcccggctctgcccgtagccctgagaattaaacgccggctctccctgcagtggtttgggctccgggctgtgagctcctctgtccatttctgtctcccccgggtcctcacccccctctccctccacccgccctcctgcctctccagttagtccgctcctcgccgcccttcccaaggaacacgaaccaatactctgcatctggaggaggggaggtcaggtttaatgtcccagtcctcgggcgctgtccagcgcctgccaggccccacggccgtgtcgctcactcgggtggcggccgacccgcctcatcagggccttccgcggaggccgtcccgtcgtcctcgggcaccagctccacgtccagctccagctgccccatgtagaggcccacggcgcacgcccagagcaggctggcggccagcacggcgcccgcgcccacggccgcgccccccagcgtcagctgcatgggtcctcgcagcgccgccaggcccacggcgtacgaggcgctgccccacaccacgcacaggccgcccagcaggaagaagcctgcgggagaggcagggtagcaacagggccaaggtcgggggatggtctgggagcaaagccagggttgaggagacaggaacagaggcagggccgtgccaggggctagcctgcatctttgagaatcagatcggaggggaggggaccataaccatgtcctgggccacccattcagatggacctagtgcctatgggaggggtgtcttctggtgggggaagaatgggggttctatacttactactgggagtgggatggggtaggagagtctactctcaccagggcaggtgataggggctctgcattccctggttccgtggggcgagagggggggtctgcactcaccatatgctgcttcccgacccatgtcactctgcatgaaggagatgaccccgatgcccgatgccaggaggccattgcggaaccaggagaggaaggctggagggagggggacatggggggattaacatcacccccaaccctacctcctcaatcccccttacccagtcaaactgaggggcctcccttcagctcaccccatcccatccagccgcaaggcaagcccatcccaaatcctcacctcttccaggaagccgctcacctaaccatatccccccacatcctctctggcctccacctcagtgcccctctcccccaaactctgtaacactaaggattcaagggccgggtgtggtggctcacccctgtaatcccagcactttgggaggccaaggcaggcggatcatgaggtcaggagtttgagaccagcctggccaacatagtcaaaccctgtctctactaaaaatgttaaaattagcagggtgtggtagcacgtgcttgtagtcccagctactcaggaagctgagggaggagaatcacttgaatccaggaggtagaggttgcagcgagccaagatcatgccactgcactccagcctgggcgacagagtgagactccgtctcaaaaaaaataaaggattcaagatagtccctgcagaatgtggaggacaatctaggggcaaagttgcagaacctccatctgaggagtcatcttggccaaacccctccctctacgtgtacccccacggcctgcccactcacttctttctcagaactctgggacaaactgtttcctaatccaggccgctcttcagcctcgcccttcttttccttcaaatgccgccatctcctaccgagtatggcctgggccaatcccatccatgtcctaccgagtatggcctgggccaatcccacccacgtccgtccccattcacgtcctttacaaacagcccaccacaccctatatctagatgcccggtcctggcctagtgaggtgactcacacctataatcccagcactttgggaagccaaggcaggaggattctctgagcccaagagttcagaccagcctgggcaacaaagcaagaccccgtctctacataaattaaaatagttgggtgcggtggtgtatgcctgtagctccagctaagcaggaggctgaggcaagaggatagcttgagcccaggagttcaaggctgcagtgggctacgattgcgccactgcggtccagcctcggtgacagagcaagacaccgtcattaaaaaaataaaattaaaaaaaaaacaaacatggccagtccgctccattctggacctcgcctccgtcacaagccccgccctctgcagcctagatcacctccccctccaatcagcagagagctttctcccgattggttgtccccttctccaatcctgaacttccccctcttctgcggggatccacactcccgctctctgcacagtggtggcctctgcaatcgggatggacccatcttgtacccaactccacagaccctaagctctccctgaagcccctctccccacggcaggcgcgattctacgaggctgcctcgcgcaaccctaccaccccctccaatccctacggcgccccgttacccggggtcctcgtcctccccgcaagcccatcccctctgcgggcacctgcgctcttgcagtctgcgcttccgtgcgctcacactgaagcccttctcggagccgagcccgggccccgtttcctgcagaagcccccgccccatcaaggtcccacgcgagcccgggacccccgtcccatccgcaccgcccccacccctagccaccgacctgtctcgtgcgcttttcggaggagccaggcgtccgcacgatccagctcggacactgggggcggcgaagccccggcgcggggaccgtggccgggggcgaaggacccccgggcgcccccgctccggggccgctgaggcggcagtagcgacctccggaagcgaagacgggcaaggcgagcggcccgagcccaccaccagccgcctcccatgattcgcactacggccgccgcgcgccgtaccgccccaccggcctccggtaggttgcaacccatgtcactcaggatgaatggcttacccattggctatgcgctcgccactcaggtccggcgtgaactgtccattggtcggaatggcagtgattccctcctctgtcatctaggccggtagtgcccgtccctccttgattttgtaccggactacgaatcccagcgatcattgcgctcggggaaagccgatattcagaagtcgcaggcgagatgtctgctgggaattgtagttttaattctatcttttttaacggagtacatgccgagcacctattgtagttgtttcttggttgtttctctttctttctttctctttctttctttctttctttttctttctttctctttctttctttccttctttctttctttctctctttctttttccctccctccctcccttccctcccctccttccttccttccctccttccttttttttccccgccccgagaccgagtcttgctctgtcgcccaggctggagtgcagtggtgcgatctcggctcactgcaacctccacctcccgggttcaagcgattctcctgcgtcagcctcctgagtagctgggattataggcatgcgccaccacgcccagctaatttttgtatctttagtagagacagggtttcaccatgttggccaggctggtctcgaactcctgacctcaagtgatccaaccgcctcggcctccaaaagtgctgggattacaggcgtgagccaccgtgcccggccaggtctgtctctttaagacagatttgttttctttgccctaacccattccgggattcagctttgccttctctcatcagcataaaccttttcactagccaggaatgtgaaaaatgtgtctggaatattttcaatttgcacttaatcccatttaaagcttcacattcattgcaagcctgcaggctatgcagtgcagtccatttgaactccctcctcaagtgtaacccccttgctagctcccctacttttcctcttcataaaatccaagcccgggccaggcacggtggctcacatctgtaatcccaccactttgggagtctgaggcgggcagatcacgagatcaggagttcgagaccagcctgaccaacatggtgaaaccccatctctactaaaaatacaaaaattaggcatggtggcaggcacctgtaatcccagctacttgtgaggctgaggcaggagaatcgtttcatgcgcgtccatgtgaagagaccaccaaacaggctttgtgtgagcaagatggctgtttatttcacctggctgcaggcaggctgagtccgaaaagagagtcagcaaagggtggtggattatcattagttcttagaggttttgggataggcggtgaagttaagagcaatgttttgcgggcaggggtggatctcacacagtacattctcaagggtggggagaattacaaagaaccttcttaagggtgggggagattacaaagtacattgatcagttaggtggggcaggaacaaatcacaatggtggaatgtcatcagttaaggctatttttacttcttttgtggatcttcagttacttcaggccatctggatgtatacgtgcaagtcacaggtgatgcgatggcttggcttgggctcagaggcctgacatttctgccttcttttattaataagaaaaataaaacaaaatagtgttgaagtcttggggggtggtatggagagagaatgggcgatgtttctcggggctgcttcaagcaggattaggggcggcgtgcgaacctaaagtgggagagattaagctgaaggaagattttgtggtaaggggtgatattgtggggttgttagaagaaacatttgttgtgtagaagtattggtgatggcctgggtacagttttgtatgaattgaaaaactaaatggaataagagaaggagaaaaacaggtataaaaggtctaagaattgggaggacctaggacatctgattagagagtgcctaaggagattcagcatagtcctgccagcaaagattatttgtttacttcaggagttaagagtggcagtttggggatagcatgaggagatatcagctgtgatggcttggagaaacagtgtaaaccagcagtgtaaacaagagcagggcacgtatgagtagttgagaacggagaataggagtatgactagacagaaaatagtagggatgacaagtttttttggggcacagtctaagttggtccggtgtctggaatgagactggggcctaataaaaaggattgtccatacaggagctcaaataggctgtaccctgcagcattctgagaagcaaaagaggtaaaagtattgtccagtcctttttaagttggtggctgagcttggtgaggtgtgtttttaaaagacctttagtccgttctacttttcttgaagacagaggaccgtaagggatataaaggtttcactgaatactaagagcctgaaaaactgcttggctgatttgactaataaaggctggtctgttatcagactgtatagaggtgggaaggctaaactgaggaattatgtctgacagaagggaagaaatgactgcggtggccttctcagaccttgtagaaaaggcctgtacctatccagtgaaagtgtctgcctagactaagaggtattttggtttcctgactcggggcatgttgagtaaagctaatttgccagtcctgggtgggggcaaatccctgagcttgatgtgtagggaagggagggggcctgaataatccctgaggagtagtagaacagcagatggaacactgagaagtgatttccttgaggacagatttccacgatggaaaggaaatgagaggttctaagaggcgggctcatggcttgtactatagcatagcctgcctttgctggtgtgtggcgattaggcctggtggaactgccatcaataaatcaagcgtgatcagagtgaggaacaggaaagaaggaaatatggggaaatggggtgaatatcaggtggatcagagagatacagtcatgggggtcaggtgtggtatcaggaataatgtgggaggccagattgaagtccgggccaggaacaatggtaattgtgggacttaagagtgagtgcagctgaaggagccggggagcagaaagtacatgcgtcaggtatgaggaagaaaatagattttggaagttatgagaaatgtagagagtgagttgagcatagtttgtgatttttagggctctaaaagtattaaagcagcggcagccgctgcatgcagacatgagggctaggctaaaacagtaaggtcaagttgtttggacagaaaggctacagggtgcggtcctggctcttgtgtaagaattctgaccacactaaccatgcctaggaaggaaaggagttgttttgtaagggattgaggtttgggagattaattggacacgatcagcagggagagcacgtgtgtttttatgaagaattatgctgagataggtaacagatgaggatgaaatttgggcttgactgaagtaatgggggctgtctgtgaagccttgcggcagtacagcccaggtaatttgctgagcctaatgggtgtcagggtcagtccaagtgaaagcgaagagaggctgggatgacgggtgcaaaggaatagtaaagaaagcatgtttgagatccagaacagaataatgggttgtggagggaggtattgaggataggagagtatatgggtttggcaccatggggtggataggcaaaacaatttggttgataaggcacagatcctgaactaacttgtaaggcttgtctggttttaggacaggtaaaatgggggaattgtaaggagagtttataggcttaaaaggccttacccattgagcagggtaagggtgattaggttttaatgagatggtaaggggtgcatgatcggttgccaaggaaggagtagaggtatcttatacttgtgggttaaggtgggggaatacaagaggaggacgcaaaggaggctttggattgggaagaagggcagcaatgagatgtagctgtaatccaggaatagtcagggaagcagatgatttagttaaagtgtctcggcctaataagggaactgggcaggtggagataactaaaaggagtgctttaaagagtatcgtctaagttggcaccagagttggggagttttaagaggtttagaagcctggctgtcaatacccacaacagttatggaagcaagggaaacaggcccttgaaaagaaggtaatgtggagtgggtagcctctgtattgattaaggggacggacttatcttccactgtgatagttactcgaagctcggcgtctgtgatggtctacggggctttcgaggtgatcgggcagcgtcagtcttcagccgccaagccgagaaggagtcagtcggagagccttgggccagagttccaggggctctgggagtggctgccaggtgagttgaacagtccgattttcagtggggtcccacacagatgggacgcggcctaggaggaatcccaggctgcgggcattccttggcccagtggccaagatttccagcatgtgtagcaagttcctgggggaggaggttctggaggaacgcctggctgctgcggttcgggcgtttggaagttcttgcgtgctggagatgtggctggggtttgtctcacagtggaggcaaggaattgcaactttttttctgttattgtacaccttgaaggcgaggttaattaagtcctgttgtggggtttgagagccagattccaatttttggagttttatttaatgtcaggagcagattgggtaataaaatgtatattgagaataagacggccttttgaccttttagggtctagggctataaagcgtctcagggttgctgtcaaacgagccatgtactgggctggatttttatatttgaagaaaaagagcctaaacgccatctgatttgggataaagaaaaaggagcattaaccttgactatgcctttagctccagccacctttttaagaataaattgctgcgcaggtggggaagggctagtcacggaacgaaactgtaaaccataccgggtgtgaggaggggaggtgatgaaacgattatagggtggaggagcggaggctgaggaagaattgggacctagcttggcctggcgaggaggggagaggtcagttgggtctgtagaaaaggaagattagaaacactcagcaacgcttggggttgggactgaggggacaggtgggagggaaagaaggaagatttgggacgagttgcattgggcacagagactaggaagggactgtgatgtgtaaaagaatgcctggacgtcaggcacctcagaccatttgcctattttatgacaagaattatttagatcttgcaggatggaaaaattcaaagtgccattttctggctatttggaactactatcgagtttgtattggggtcaagcagcattgcagaagaaaataaggcgtttaggttttaggtcaggtgtgagttgaagaggttttaagttcttgagaagacaggctaagggagaaggaggaatggagggtggaagtttgcccatagtaaaggaggcaaacccagagaaaagagagcgtagagacacggagggaaggggttcagggttcttaccctccagaaaagcaggaagcggggtcggggcatggaaataagggattggggcacagagataagaggttggggtgcggaaataagggattgggggttcttgacccctagaaaagcgggacttgccactaagggtgaaggagaaggggttgatgggtacttgtcccttccccagaaaagcagagaaggggtagagacacagagaaggggttggggaacttgcccctcccccagaaaagcgggacttgccaccaaggatgaaggaccaaggcaggcgtccctgcgtggtctgacacctttgaaacgtgggtgaataatcagagaggcgtccttgcaatgattaaacaccaagggaaggctgccttcccagtccgtgaccggcgccagagttttgggtccacagataaaacgtgtctcctttgtctctaccagaaaacaaaaggaatagaaattaagagaagggagagattgaagtgtggcgccaagattgaaaggagaaagaggttgagagatagtgagggaggttggaaaagagtaaaaagaggccgcttaccggatttgaaattggtgagttgtttcttgggctggtctgtctgaggacctgaggtcgtaggtggatctttctcacagagcaaagagcaggaggatgggggattgatctcccaagggaggtcggtcccccgatccgagtcacggcaccaaatttcatgcgcgtccgtgtgaagagaccaccaaacaggctttgtgtgagcaacatggctgtttatttcacctggctgcaggcaggctgagtccgaaaagagagtcagcaaagggtggtggattatcattagttctgagaggttttgggataggcggtgaagttaagaacaatgttttgcgggcaggggtggatctcacacagtacattctcaagggtggggagaattacaaagaaccttcttaagggtgggggagattacaaagtacattgatcagttaggtggggcaggaagaaatcacaatggtggaatgtcatcagttaaggctatttttacttcttttgtggatcttcagttacttcaggccatctggatgtatacctgcaagtctcaggtgatgcgatggcttggcttgggctcagaggcctgacaatttgaacctgggaggctgaggttgcaatgagctgagatagtgccactgcactgcactccagactgggcgacagagtgagactccatctttttttttttttttttttttttgagacggaatttcgctctgtcgcccaggctggagtgcagtggcacagtctcggctcactgcaagctccgcctcccgggttcacgccattctcctgcctcagcctcccgagtagctgggactacaggcacccgccaccacacccagctaaattttttttgtattttcactagagatggggtttcaccgtgttagccaggatggtctcgatctcctgagctcgtgatccgcccgcctcagcctcccaaagtgctgggattacaggcgtgagccaccatgcccggccgagactgcatcttaaaaaaaaaaaaaatggccgggcgcagtggctcacgcctataatcccagcactctaggaggcctaggcgggcaaatcaccaggtcaggagatcgagaccatcctggctaacatggtgaaaccccgtctctactaaaaaatacaaaaaaaattagccgggcgtggtggtgggcgcctgtagtcccagctactcaggaggttgaggcaggagaatggcatgaacccgggaggtggagcttgcagtgagcctagttcacgccactgcactccagcctgggtgacagagtgagactctgtctcaaaaaaagaaaaaaaaaaaaacggctgggagcagtggctcacgcctgtaatcccagcactttgggaggccgaggtgggcggatcaccaggtcaggagatcgagaccatcctggctaacgcggtgaaaccccgtctctactaaaaatacaaaaaattagccgggcatggtggtgggcgcctgtagtcccagctactcgggaggctgaggcaggagaatggtgtgaacccgggaggcagagcttgcagtgagccgagatcgtgccactgcactccagcctgggcaacagtgtgagactccgtctcaaaaaaaaagaaaagaaaaaaaacaatccaagccttacttagtgaaagataaaggagctgattttaagaggggcctggcccagcaggctttgtagccaaggtccaaaggggcagtggagggctctggaacatcttcctctcattggtgggtttaagctggggagcaacattaccagatgcacatttagaggatcctcgaggctgagcacaggggcttatgcctgtaatccgagtgctttgtggggctgaggtgggaggatggcttgaggccaggaattcaagaccagcctgggcaacaaaatgaaacctcatttcgttttttgtttgttttgagacagaatcttgctctgtcgcccagactggagtgcagtggcaccatctcacctcactgcaacttctgcatcccgggtccaagcaattctcctgcctcagcctactgagtagctgggattttaggcatgtgccaacatgccaggcaattttttttttttttttttttttttttgagatggagttttgttgttgttgaccaggctggggtgcaatggtgagatctcagcttgctacaaactctgcctcccgggttcaagcgattctcctgcctcagcttccctagtagctgggactacaggcacccgccatcacacccagctaattgtttgtattttcagtagagatggggtttcactatgttggccgtggctggtcttgaactcctgacctcaagtgatccaccagcccaggcctcccaaagtgctgggattataggcatgagccaccacacatggctttaacatttttttctgatcaagagttcacagttgcccttttcttgttttttattttcattttctgtagagacggggtctccctgcgttgcctgggatagtctcaaactcctgggctcaagcgatcctcctgcctcagcctcccaaagtgctgggattataggcatgagccaccttgcctagcctagctgcccccatctgactgctgctttgactagagcaaacttgagtcaggtttatctccttccatgggcccctgaacttctagctcaccctcaagtctgagcaagcaatgaaatgtggaaggtgcctcctggttagcttatcctgagaactgcctgaccccacatagccctgtttcctgttgaatgatgcagtcggcttagtccctgtcatctgcccaaccttcccagactgcaaagcccccttaacatagaaaatgaatggctttttttgtttggttttgagatgcttgcagatttctgagactaggacattctccctaatgcaacaaactttatgaagtttctcagtatttaagtttggatatgttgttttcttttctttctttcttcttttttgagacagagtttcactcttgtggcccaggctggagtgcaatggcatgatctcggctcactgcaatctctgccaacggagcatggtggcacacacctgtaatctgagctactctagaggtttgctaatttgctagcagaattcacggaactgggcggagtgcagtgctcatgcctgtaatcccggcactttgggaggctgaggtgggcagatcacttgaggccaggagttcaagacctgccatggccaacatgctgaaaccctgtctgtactgaaaatacaaaaattagccaggtgtggtggcacatgcctgtagtcccagctacttggggggctgaggcacaagaatcgcttcatcttgggaagcggaggttgcagtgagctgagattacaccactgcactccagcctgggaagcagaaagagattcttgtctcaaaaaacaaacaaaaaggccaggcacggtggctcacgcctgcaaacacagcactttgggaggccaaggcgggcagatcacgaggtcaggaaatagagaccatcctggctaacacggtgaaaccccatctctactaaaaataaaaaaattagcctggcatggtggcacacgcctgtagtcccagctacttgggaagctgaggcaggagaattgcttgaacccgggaggcggaggttgcagtgagccaagatcacgccactgcactgcagcctgggcaacagagagagactccatctcaaaaaaaaaaaaaaagaagaagaattcattgacagctgccgtgctcccggttatggtgtattacagtgcaagaatacaggtgaaaatcagcccagggaagacgggcattcggcagagcctgggggcggggtcccatcctgaggcttccagccctcttgtccccatggaatgtggacagcgctcactttacccagcaacagtgtgtgacggtacatgtggagctttgttgaccagggaagctctcggaagcctcactgtccagaaccttcattacccctgagacgcgtaaacccagtcgtcctccgtgagactgaggtgacctcaggcgccagcccttccagaggtcagctgataccctgtgaccccagggccccaccctgagtcacattgttactagcctagttggcccaaggctgataggtaaaccaagataatcttatcaggaacgacattccagagatttagaggagatgacctcaaaggcactgaggacaaaggtcttacctctctttggggaaggttaaattcttcattacactgaaccaaacaatgcaggccgactccagaagctgaaaaaagataaagaaatgaattctcctccgagtcccctgagcaggaacacaacccagctgacattttcgttttatttatgtatttattttattttattttttacttttttttttttttttgagacagagtcttgctcagtctcccaggctggagtgcagtggttcaatctccgctcactgcaaactccgcctcctgggttcacgccattctcctgcctcagcctcccaagcagctgggactacaggcgcccgccaccacgcccagctaatttttttgtagttttttagtagagacggggtttcaccatgttagccaggatggtcgtgatctcctgacctcatgatccgcccacctcggcctcccaaagtgttggggttacaggcctgagccaccgcgcctggcctattttttacttttaattaattttttaagacagggtatcactctgtcacccaggctggagtgcagtggcttcatctcggctcactgcaacctcggctttcagggctcagcctccccagtaactgggaccacaggcatgcaccaccacacctagctaatttttgtattttctgtagagttgggggtctcaccatattgctcaggctggtcttaaactcctgggttcaagccgtacacccacctcggtcccgagagtgttgagattagaggtgtgagccactgcaccctgccgttttatttttttaatttgtatttttgtgacagggtcttactctgtcacccaagctggagtgcagtggcgcgagcatggctccctgcaacctagacctccccagctccagtgaccctcccctctcagtctctggagtagctgggactacaggagtgaaccaccatacccggctaattttttttttgtttgtttttctgacggagtctcgctttgttgccaggctggggtgcagtggcacgatctcggctcatttcaatctccgcctcccaggttcaagtgattctcctgcctcagcctcctgagtagctgggactacaggcacccaccaccacacccagctaatttttgtaattttagtagagacagggtttcaccatattggtcaggatggtctcaatctcttgaccttgtgatccgcctgcctcggcctcctaaagtgctgggattacaggtgtgagccaccatgctcggccctatttttggattttttagtagagacagtatcttgccatgttgtgcagactggtctcgaactcctgggctcaagagctcctcccaccttggcctccaaagtgctgggattacagatgtaagccacaacacctggctacatcttggtttttagacttctgatcttcagaactgtaagagaatacatttgtggccgggtgcggtggctcacacctgtaatcccagcactttgggaggctgaggtgggcagatcacccaaggtcaggagttagagatcagcctggccaacgtggtgaaaccccgtctctactaaaaatgcaaaaattagctgggcatggtggtgggtgcctataatcccagtcactagggaggctgaggtaggggaattgcttgaactcaggagatggaggttgcagtgagctgagatcatgccactgcactccagcctgggcgacagagcaagactctgtctcaaaaataaataaataaataataaataaataagtagaatacatttgtgttgttttaagccactaggtttttggtcatttgttacagtggcaacagagaatacagttatgaaacccaacaatggatatagttgtgaggatgtgagaagtctacagaggaaagtaaaaggaagaagggtggggaagggagggtgaagaaaaaacaataaaaggaaagaaaagaaagtagatggaatgatggttcagatgtaataattttatttatttttatttatttctttgagacagagtcttactctgtagtccaggctggagtgcagtggtgtgatctcagctcactgcagcctccgcctcctgggttcaagcaattctcctccctcagcctcccaagtagctgagattacaggcgactgccaccacacctggctaatttttgcatttttagtagagacagggtttcaccatattggccaggctggacttgaactcctgaccttaggtgatctgcctgcctcagaggttgcagtgagctgagatcgtgccactgcattccagcatgggctacagagtgagattccatctcaaaaaaaaaaaaaaaaaaaaaaaaaaagagagagcagggtaacagggttaattgttgtccccaaaaacatatttctacatcctaagccctggaacctgtaaatgaactaatgaactgtatttggaaacagggtctttaaaaaatatacatatataagctctcactgttgtccaggccagagtgtggtggtgtgatcacagctcacagcagccttgacctcccaggctcaagggatcctcctgcctcagcatcccaagtagctgggactacaggtgcgcccaccacacccagctaatttttcctgtattttgtagagatggggtcttcctatgttgcccaggctggccttgaacgcctggcatcaagcaatcctcctgcctttgcatcccaaattgctgagattacaggcgtgagccaccacacttggctgggaaacaggatatttaatgaaagatcttaagatgagattactcttgattacttggttgggttctaaatccagtgaagagtctttttttttatttgagatggagtcttgctctgttgcccaggctggagtgtaggggcatgatctcggctcactgcaagctccgcctcccggcttcacgccattctcctgcctcagcctcccgagtagctgggactacaggtgcctgccaccacacctggctaaatttgttttttctgtatttttagtaaagatggggtttcactgtgttagccaggatggtctggtctcgatctcctcacctcatgatccgcccacctcggcctccaaaagtgctgggattacaggcgtgagccaccgcgcccgactgagtctttctaagagacagaagacacagacacagaggagaaagctctgggaaaagatggaggcagagattgaagcgatgtcaccacaagcccaggattgtccatggccaccagaagccaggagtggaaagcaaggattctccctagagcctcagaggcagcctggccctgtggacaccttgatggtgcacttctggcctctagaacaaatttctgtcatgttaagccgcccagtctgtggagatacgtaggcagccctggggctctaataccaatggaatgccaaaatggaatttagaaaatgcaaccagccggccaggcacagtggctcacacctgtaatcccagcactttgggaggctgaggcaggtggatcacctgaggttgggagtttgagaccagcctggccaacatggcgaaactccatctctgctaaaaatacaattagctgggtgtggtggcagacacctgtagtgccagtgactcaggaggctgaggcaggagcatcacttgaactggggaggcagaggttgcagtgagccaagatagcaccactgcactccagcctggcggacagattgagaccctgccacaaaaaaagaaaagaaaaacaaaaaacaagaaaatacaggaaacagttaacacctgtagaatctgggcagtggatcagggcaggtactcaaagagcacctggcaccagttgttggtcccagtgtccaggtaaccctgggctgtggaaagctcgaccacatcctggtgctggtggccatctctgccctccctcagcctccataccttcctccaatggagatgttcctcaggctccacgcacttcctgagcgacatggtccactcttgcagctctattttttttttttttttcaagacggcatcttgctctgtcacccaggctggagtgcagtggcactgtctctgcctcctgggttccagtgattctcctgcctcagcctccagagtagctgggattacaggcgcccacaaccacacctggctaatttttgtatttagtagagacggggcttcaccatgttgaccaggttggtctcaaattcctgacctcatgatccgcccacctcagcctcccaaagtgctgggattacaggcacccgccagcacacccggctaatttttgtattttagtagagatgggggtttcaccatgttggccaggatggtctcgaactcctgacctcatgatttgcccacctcagcgttccagagtgctgggattacaggcatgagccaccgcgcccggccaactgcatgcgtttttaaagctgttgcagttcttctgcccatcctgctgctgagggactccctcccctttatgtaaactccaagaaaaccctctatcttgtttgctgggtttgggtctcagccttttttattttttttaagagacaggggtctcactctgttgcctggcctgctggagtgcaggaaagtgatgtagctcactgcagcctgaactactgggttcaagcgatcctcctgcctcagcctcccgaagtgctgggatgagaggcgtgagccactgcgcccaaactgtattgatcatgcattcagccatctatccacccatccttcatatttgttgatgcatttcaaagtaagttccaacatcacaacagacccctcctcagaggatacccctggctatcacatgggtagggtgcctgctaaagctcgtcccgtccctggaagccagcccagctgtcctgtctgtgttaatggtctttctatgagcactgcaggggcagatccaggactgtgcaggtcacccctggatcccaaatgctgagcgtggcccgcacagaagctcagggaccttgggatgttgctagtaggtgatctactgccatccactgaggacagctgacactgtttggaggcacaaattgtccctcagtgtcctcatgttaccctgaggccgaccgctgagagaataggtccttgtttcaccccccagccaccttccaccctcgttaattcccagggcaagggatggtctggggcagcctggagagaccagacccacaagctttttaaaataactgcatcctttaatggcagtaatacaattactggattaagagaccacaggagaaaggcaggtgacgtttctggaagacagatatggagtataaaaagggtgtgaaatagtcatgcggcgatcattgtaaaaatacagttcattatatacatatttgcaccaccaactctcaactctgaaacagtatttacacttttgttacaatcctggttagagaacaatttttctttaaaagctcggcctgatggcaaatgagaatttcgggtgaattcatagtcctatgaggttcttaggctgaatattccaagaggagggctccagcttctatttcatccacagatttcggtttaaaaaatatttttcttttacaaaagaaaattctcaaaaggagaggaaaaacaacaacaaaaaccacaacactgccacactgtgtattcatacttattttacaaacaccaagggctgtgccctctgcttcaaggccaacactggtggctgaagacaaatctcattaatgattgtgtaaaaaaaaaaaaaaaaaaaaagacaaaaagacaaaccaaccaaccagatcccagcactgacccctcagggctgtgcagccctgtaggacaccctgcctcctggctccaaactatgagtttttcatttttctctttttggggtggggtgggataggagccttgttcaccccaccctgaggaggagggaaggggaatcccttggcaggtaactaggtctcttcatggtcagcaatgaagagcttggcctgcagccacatggtgggccagggagacgggcagatgcagccacaagcacacacttcctgaggcccctcaagtggcccagaggcaggatagcaggcctcccccagcaccccttgcgcccatctctcgggctgtgtccataggtgggcctcctccagggctctgcagatgaggctggccctcagccagggtgggagcatggggggagcagaggctccccatcccctggctgcagggttcccactcagtccgtttcttaagtgtccacaaatcccacagagcaacacaccttggaacacctgcatctgctggcttgggaaaggaaacccgaacacatcaatacctcatgccctgcaggtcacacagtgtaaggaggtgcgaggaaaacagagaacacttggccaggagccaccccagggtccccattgttggggcctggcggcgcagccactgcacggatcctggagctgtccggggctgggctgcagtgcaggcatagcgggtgcgtggcttgaggaccaggacagaccctggtgtgggcaagcagggtgtggcccacctgataggacaggtggggtaatactgacagaacgtgcgtgctcctaggggctgcctcctagaggtggctcttcaggactctgccccacaccggcccccactacctttgggtccagttctcactgtggaggcttctgctgcaggctggggggcatccgcttgctctagacggagggtggcagggagggcacgtgtggtaatccagggacaggagcaggcatgcgccagggagcccccatagtgccgctgggggctttttccttaataccttttcactctcactgtctcctgagtgggttgttacagcctgcactgaaaagacagtgatggtgcaccctagggttctagaaacgcctggacctgcttccacgcaggccctgccatggtcttggttccgggtctcttcgggcacagggtgaggagcgttcaataccttcccagacaccaactgttccctttgtcctggggaaaaggggccatgctttgcccagaaaacccactgggcctccagcaaggcccggccacgcagagcccacagagtctgaggccaggcactggcgaaagttcacaggtttgcgggcatgagtcggtttgctcagcaggagcccctgagcccgccacactgaccagaacttaagatggttatatacaatttacaaatctcaaagaaagtactactttaaaaaaaaataaaagagacggaaagcaaaagaaaaagaaaagaaaaaaggaacacccagcctgcctccccttgcccccaagttccctaccctgggtgctgccctgaatgccaccctaggaagggtggctggagccgcagctctggctggacactactggcaaaagggggaggccgtggggtcgaagcctttaaaaacatccttcagggatgccgcatcctgctcaccctcgcgggccggactgttcccagcaaatgggcttcctgagcccgtcttgggtgtctgcttcaccgtcccgaagagggtgggcacgggcaggttgtgcaccccgggctggggtggggcaccctcggggggtggggtggcggtggtggcagcgggggctgcagcagccttgggccggggccggttgtagctgttgtatctgtccgtgggggtgcccccatcagcaccggccttccctgtctctggctgttccagggcagacttgcggacgaacgggggctccttagccttggaggccgagctcttgccattgccctcagcacccttgggctgggcacccgtgtcagcagccggctctgtggctttgccccccgcgttgggagtcctcgggtcgtagaggctgataccgctcagcacactgctctgcccgccccctccgccctggcccagtccaccggccgccagcacgcgggggtcgtagggagcggtggctggtggggaggcatccccactcgggctggcggtgggagagggcgcctcagcagggccgggcttggcagcccgggaggaggccgtagagtctgtgggtttctgcagccgagggtcggtgggggccttccgcacccgggggtcactgggtttgtcgctggaaccgggggcggccgaggagccggtggcattgactgtcttgaggatgcgagacagaagttcaaagtcggggaggttggcgccctgtgtgctggaatccgtggaggcgcccgggcgctgccgggcgttggggggccctgccgtggcagcgcggtgcagccgggggtccagggtgggcatggattgcagggccgcgggcacggggggcactgcgtcctgcttggggatgggtagggggatcaggtcctcgggattccagagcacggtgcgggcgaagctgggcttgctcagggtcacgtccttcttgatgtggctgaactgctgcagctgtgaccgtgggtcccgcagagggtgcccggggagtgggtccaggggaatgttcacggccttctcccgcagggcccgctccccttcctcctcctccgttgggggcggcccagaccccttggaactgctggggcccacagggctggaatgaaggctgccttcgggcttggaggtgggcagggcgcgagccagccgaggatcggagggtcccgaatcacctgggccagacccgccagaagcctccacatggcgggtgagtctggggtcccggctgaggcgagggtcagccagccggcttcctgtggggtgtcccttctggaggcgggggtcccccagcccactgctgctcagctccccaactgaagccgggggtcggctggacgtctgctgcctcaaggtcttcaggatggaggtgacactgcttccaccctcatcctcatcacttgagtaccagtttccggtgtcacctgggaaagaacagaggagcagggaggggtgagtgggcgcatccaccacccgccctcttggatcccacagcagcccaccgtgagcagctcctttgcttgtgcctctcagaacctcaggtcctcctctctaaggctccctccccacagtgggcggctgaggagacccagagagctaaggcgctcggtttatgccatgctccccagctctcctcagtggcggcactgcactaagtagtttgttttatttaaataactcacaaccaccccaggaggtagtgatactatcatgcccatttgacagatgtgaaaacagaagcacagtgccgttacattggagtcagggccaggatcgggctaggactcctaacccagagctctgctgtttcctcccgcccacctccgggctggttcagcccccactgtggcaagtccagctgtgggcacctctttctggaggtcctggtagcagacaccattgactcagttctggctgggcctggggctcagagacacttgaccccaaaccggctcgtgatgtccccatgtcccagggaggggctggtgtggaccaaccgcagtcaccagctgataagaggcagggccggctgggcagactcagacatgggctcaagcaaaacctaggccagtacagcctgggccatcaggggagcggcccctcctcctgctgtcccactggctcctgcgctacagtcagggccacctgtggcctctggcttcaggatctagacaccacttgtcattttaccccaaagtggacaccactaagtcaaccatgcagcaactgagactcggtggctcgtgactatgattattactggttaatttcaatgactagctcttgtttgttggctccttgagaacacggtaggaaaacaggggctgtgagggtctccctaaagcctcctctggcagggcacaggcggtcaatcctgttggccactgtctcctccaggaactagccctccatcctactccatgggatcagggtctctcctgaacccaacacagaaagccacccctgactgccagttttctcagggacatgcagcagccccagcccggcttcatggccctggacaggggtcctccctagccatgggctccttcctgacaggaaacccaacctggaacaccccaccaccgccgctcccctgcacagcggcctggggcctgtgccccggcccctggggcggacacgtgccttcctcattctcccggtcctgcttgctgctctcagccagcctcctcgctctctcctcctcctcctgctgcttctgctggatcctcaggtacagggccctctgggctgagggcaggaagtcagggacaccggcgcctggcttcggccggcctgggggccctccctcagagaagctgtcgggctccagagggtgctcagggaagaggtgctccccaggctcccctggcagctcttcgtagtgcccgtagtcctctgtggcagggaagaaccgagggttcatgtcgggaagggcctccaggtgccaactccagcccccctgcccctcactgcaaacccacaccgatggcgatggagaaggacgcacagcctgcccctgcctgccctccccaggtctcaggggaacagagcggcccatgggtagccccgcctacatgaagaatgaggttcacagagagggttgagtgatgcgggcaaacgcttatgaggtggaaacaggatggaacattggatgtacgtttgtaagacgcaaggagaaagctttgaaaagacacacagaaacagtccctctggaacacagattctggagaggccagggatttctgtactctttcctgtacttttaaattattttggatggataggagttgcacggtttctttctaacaatcagtaaggaaacaccatgcatctcatagtgaactcgaccatgttcaacactaaaagccaggaaaagagaatgaaacgggtcaagtgctgctctggccacaggtcaacagcagttccagagtgcctccctgcccactccacagcattagggggtgtctcaggaagcacggggcctccacctcctgcagcgtgggcactggcaccagccacctcaccccacacactcccccagtgcctgagccaagagctgtgggcagcagcacaggctgacgtggggacgcagcaggcgtagaggggagggcaggctcggcgacgcctcctgcatgttgcgtgtgtgacacatgtgagcatgggagacatcgaatcaccgaaacggaggggggggcgtctggagtcagtgctgccccacagaacgctctgcagtgatggaaatgttctagatctgcagggcaacatgtggccgcctagatcctcctggggcagctgagcatttaaaacgtggtgtctagaaaagtgcacttgtaacttagcttacattaatttcaacttcgtcaagtgaacctgatgggccagcctgctctatgacacatcccagcgcagagctgggacccactccatgaaccagacagccgagggtcccccttcacacacagtctgtgcacacaccagaaaccaatgaccatacatgttagagggaggattttatgaaatgggattattctagagacacctactgctaccaacgtgacggacttctggtgccccgccagcagagcttttcccgtgcaccttttagacgcatttgttgaagggggaggagctgagaaccccagcacctactgtggcagcctgtttttctcgtctttctttctaaagcacccactctcacccaagtacctgctctcccaggtccatgcaccacctaaagccaaagcccacgttcacattttgatctctagcctgggcctctcccaatgccccttaaaccaccccctcaaaatttccacatggccgtcggaggggcaggcaccctagagtgactatgccgcacgtccagcgccccatcctcaatgccgctcctgcccaccttgcaaaacaaacacggggctcccactgccccacggcaccgtgtccaaacctcgaagccctgccttgcactccagtggccgccctgctgcctctgcccagggacagcccccagcagctgccacagcagctcccccagttcaacacagcgcccccacccgctgccctcggaggtcccatcattcctcacgttgtgagtgccgcttcacttctcaaagagacttttgtgactatccccactgaggcactgagccttctggcccaccgccacggttccccaccttttcttctaagaatggccaatgctgaaaggagccaactcctctatctacacgcttgccacctgcttgtttccaccaagatgcaactgagcgaggacagtggtggcctctcgtgcctggccctcctccagagggctgcacaccacatctcctatggctgcagcagcgtcatctaaacccctctgctcactggacatttgttaccaatgcaaaaggaaaaaaaggcaggaaaacggccggtaatgggcacagaacccgcagagtcctggggtggacactggttgctccaagccgagaactgcccggaaagagatggttttggccaggccactaactgagtcctgatgggcccaccagcctctcagcctcacacccttgcacactcgtccctctaacttcccatgcttccgattccaggcacagcttgcaaaattaaaaagaaataacctatattggtaatacacagaatactcctttcttcttcaacagaatacatcctatgtcactgaaaacattcaaccattaaatgggacagagatggagtcatgctttcaaagagacttggacgaaggaagaaaaatcacatctccccaactctgctccactgggtaaagcctgcagccccaggcagccacacctggagtcccgcatacctgcatcccccaggagtccgggctccatctccatgccctcctgctgctggtagaagttttcatagaagttctgggctggcgggatagggggcatcattccagaatgtggggagtctccagggccgtagggcatcattggagggccgccagggcccatgggtgggccaggattcatgccagggcccatcggcatgtctgcgtgcatgtctgcgtgcatgtcagggtgcatgtccgggtgcatgtcggggtgcatgtcaggatgcattggaccgcccattggccctgggggtcccatgttgggcccagggcccattggccctgggggtccaccgggtccagggaacctagaagagggaaaaggtgcctgtgacggaagctgccgaggagggcagtggccacaccccagaggagaggcggagggctgcagagccgaaggtcatgggccccagaccaggactcccacagctggggagagaggcaggactctcccacagccaggcttgccctaacaagaggagcctggctgggcccaggacagcgcccactgcctgtcacgggggtccagggcactcacctcacacccagcttctcagccagctgtcccgtgggccgcaccacgatctcaaacaaggaggggatcttcttgttgtacatgtcctgctgctgcagctgctgcggggacagtggctcatgcaccggcatgggcatctgagggggcccgggcggtgggggagggggagggggcgggggcggggggccaccctgcatgggcctgccgttgggagaggttggagcctgcgggccagggggccgaggaggggtgggcaggaggcccacaccagggggcggtttgggcagggggttgatgccctgcttcttcagttcctccacctccttctcatcctcggcacctgcttctgcatcatcggccaacatctgcgggtgtgaaagaacaaaagaaggtgtggacggggtcaggatggaaacggacctctccaggtctgagagctgaagtttatgaggaaaagtccataatacaaggaccttgagatctaaaggcataaagaccacaatggctctgtaacaaaaatcatcatcagccacctctctgctccactctcggggaccagctggtagagggggggccattcctgctctatggcaaaatacacataacaaagcatactgtttaaccatttaaagtgaacgattcagctgggcgcagggactcacatctgtaatcccagcactttgggaggccgaggtgggtggatcacttgaggccaggagttcaagaccagtctggccaacatggcaaaaccccatctctactaaaaatacaaaaattagccaggcatggtagtgcacgcctgtagtctcagctactcgggaggctgaagcaggagaatcacttgaacatgggaggcagaagctgcagtgagccaagatcgcaccactgcaccccagcatggacaacagaggagactctgtctcaaaaataaataaataatgccagacgtggtggctcatgcttgtaatcccagcactttggcaggctgaggtgggcagatcacctgaggtcaggagtttgaggccagcctggccaacatggtgaaaccccatctctactaaaaatacaaaaaaaatagccgggcatggtggtgggcacctgtaatcccagctactcaggaggctgaggcagaagaatcgcttgaacctgggaggcggaggttccagtgagccgagatcacactactgcactccagcctgagcgacagagccagactccatctcaaaaaacaaaaacaaaacaaagtgaacgatgcagtggcatttggcacattaacaatgttatgtaaccgccacctctatatagttccagcacattttcatcacccccaaaagagaccctgtacacactaagcaatcgctccccaccctctacccccagcccccggcagccactctgctttccgtctctgcggacctgcccctgctggacagctcctgcgaacagactcatgcgctgtgtgcgatgggcgctttcacttagcaaagtgcatctatctacaacactgctacatctatcagtatgtcactctgttttttatggctgaatcatattcccctgtcatgtttggattttaagggcctctgatctcaactcctgaccatgacccttagggcctaagagcaggggtgggtgtctgggtgtctaggtatctggggacgactgggtagcttcctggcagcttcatttcctcccacgatcccgactcctccaccccaaccacccagcctcgtttcagtgcaatgagcagccaagctctcccctacagggccaggaccagcttcccccaggtttttatttttcctgttattcccatgtggctcaacgtcactcaactgttgaggtccctcattagatgtcaattcatagtgtctgtccagtctcctgtattcactactgggtcaccaggagttctctgccaacactgcctatgccttgtcggattattcagtcattcccatgttcatcctggctcaacctccccatcaactccaagagggcaggactgtttcttccctgctatatccccagggcccccacgagacctgatacagggcagacgcccagtgagtgaatgagaaatgtcaaaatctcaactggactagaatgtctcatcagttaggatagcgtgcagaaaagtgacacaggaggcctggctgctctccttggaaggcctgcttgcaaggctaggcctcggctggtgtctgggaagctgcattttgggagggctcccagcattcactgtccagtaagaggggctcactgcatctaaactgtttctgcaaccaatgcagtttgtgctgaatgcctgctttgccccccaaatctggaattttggtccatgctgggcagaggctgcctaggtgagcagcctagtgaaaaccctgggcgctgagcaagtctcctcgcagacagcatgccactcgtgctgtcacaactggaggagggcagcgtggcccctgcgagtccacaggaagaggatgcgcctgcttcctccaggcgccctcatgtactcattcccagggctgagtttgcctgtgtcccttcaccgcagttaacatcttggccgtgagtcccccagcaagttgctctgggtcatcttggggaccccagcacagatcccttagttggtcctaacacagggtcatcaagataaactagtcctgcccctctgcccaggaacagcaaggcggacagaaacaggaccccctggtgggggttgtgcattcgcagttttcccttctcctagccattagcaatggtatctggaccctggaaccccagggtccaataagaatgtggcttcatggaggaggtgtggaaaacgacgcggtggaacccctctgtccttctgaaccctgatattccaggggtggtcagcgtgtgaaccagcagcacagggggacccgtggaggcagaacccgcattctgccctttgagcgtgggcaccaccacctgagatgagccttgctgggagggcccagagccttgcgccagctgctttcaacactgccacgggctcacttcctcctggcccaagggcccttcctcaactgtgtgtggggccatggcttgcgctgcagctgccaccctgcatctccctcctcctcctcctcttcagtccccactgccgcacatcctggggccgccagtgtcacctcctcacaaagcctcttgaatgtctgcctcctgaatagagcccagctagagtcctgggctcccacacttattcttcacggcctgatccccacgtgtgtgtgcgcacacacacatacacacacacactcacactccccatgtgtcatcagcatccgcccaaggacctaaccctgcctcctcagcacccccagtgcctggcacaaacaaggcacagagatttattgagtgaacgactaagcaaggaacacaaaccaatgcattccctggaatccagaggctgggtccagtgcagaggagaaaggagctcaggccctgaatggttgactccaccatggagtcaactgcggagtcaacccaaactgcccatcggtcctgccagcacagaccctgtggagggcacctctgtccctggcccctccaccagcaaagacaccagctgagacaactagcaccccgctaggtgccaaaacctctctagccaggacagactatcagtgatcacagtttccaacagtcagtcaccttctgcaagcaataagtaacacttgtagaggtgcagaggcatgtgggctgagccccattaggccatgtgaataagctccaggccactggtcaccaacgctgttgcctcgaactggaaacaactcaaatgtccttcaacggatgactggataaacaaacacagatcatccgctcagtgggacactacacagcaacaaatggtaatgaactgttacttgcaacaacgggtgaacctcaaaggcttcatgccaagtgcaagaagccagactcaacacatgcacgcgtgcgcgcgcgcgcacacacacacacacacacactcacactcttaaagcctgtttaccccataattctatttatatgatttgcttgaaaaagcaaaaccaaaagacagaccctgatccacggttgccaggcactggagatgtggggtggcatttactataaaggacacagcagagtttctggggtgatggaatgggtttcctagatccatcttgtggggtggtgacatgactcaatgtgtttgtcaaaactcatagaaccaggccaagcgcagtggctcacgcctgtaatcccagcactttgggaggacgaggtaggtggattacgaggtcaggagttcaagaccagcctgaccaagatggtgaaaccttatctctactaaaaatacaaaaatattagctggccgggcgcagtggctcacacctgtaatcccagcactttggaaggcagagccgagcagatcacgaggtcaggagttcgagaccagcctgatcaacatggtgaaaccctgtctctactaaatatataaaaattagccgggcgtggtggcacacacctgtaatcccagctactcaggaggctgaggcaggagaatcgcttgaacctgggaggcggaaactacagtgagccaaggttgcaccactgcactccagcctgggtgacagagcaagactccgtctcaaaaaaaaattttttcaaaaaaacattagctggatgtggtggcgggcctctgtaatcccagctactcaagaggcagagaactgcttgaacctgggaggcggaggttgcagtgagccaacactgcactactgcactccagcctggacgacagagcgagattccgtcttggaaaaaaaaaacaactcacagaactatatatcaggtgcggtggttcatgcctgtaatcccagcactttgggaggcctgcgggtggatcacctgaggtcaggtgttcgagaccagcctggctaacatggtgaaaccctgtctctactaaaaatacaaaaattagccaggcgtgtgtcaggcacctgtaatcccatctattcaggaggctgagacaggagaatcacttgaacccaggaggcggaggttgcagtgagccgagatcgcatcattgcactccagccttggcaacaagagtgaaactccgtcttaaaaaaaaaaaaaaactggtaccaaagaggacacacaaaaacatagataaaatgctaagaactgcttaaagcactcagataaatttagaaggtatggattctcagctaggcatggtggctcacgcccgttatcccagcactgtgggaggccaaggcgggcgtggatcacctgaggttgggagttcgagaccagcctgacaaacgtggagaaaccccgtccctactaaaaacacaaaaaatgagccgggcgtgatggcacatgcctgtaatctcagctactcaggaggctgaggcaggagaatcgcttgaacctgggaggcggaggtcgtggtgagccaagatcgcgccactgtgctccagcctgggcaacaagagcaaaactccgtctcaaacaaaaaaaaaaaaaaaaaagaaggtatggattttcaggaaaaaggtctgtgtgcatactccaaagcagaaatctacaaccctctaagttttgcaaacatcaagttttgctttcagaaaatattgctctctacagaatttacttttaacggactcaagtaccattatacttaatctctgttggcttcacaggtgcccacttccatgaagccaagggagatcaaatataatcccaatgccacttaaaaaattttttttccagccgttgaaactacatacaaaaagcccccctaaactatctctatttttttcattattttttattatttcctaaaattatgtttggcgataaatgagatatattgttaaaattaatttcacgaggtaggtggcttatttcaggtcaggagtttgaaaccagcctggccaacatgataaaacctcatctctactaaaaatacaaaaattagccaggcacggacgggcatggtggctcacacctgtaatcccggcactttgggaggccaaggcaggagaatcgcttgaacccaggaggcggaggttgcagtgagccgagaccacgcccactgcactccagcctggcaacagagcgagactccgtttcaaaaaaaacaaaaaattagccaggcgcattggtgcacacctgtaaccccagcactttgggaggccggggcgggtggatcacctgtcgaggtgggtggatcaggaattcgagaccagcctggccaacatggtgaaaccctgtctctactaagaatacaaaactaatcacgaatttgagaccagcctggccaacagggtgaaaccctgtctctactaaaaatacaaaactcagctgggcatggtggctggcacctgtaatcccagctactcaggaggctgaaacaggaaatcacttgaacctggaaggcagaggttgcagtgagccgagatggtgccattgcacttcagcctgggcgaaagagtgaaactccgtctcaaaaacaaacaaacaaaaattagccgggtgtggtggtgggcgcctgtaatcccagctactgtggaggctgaggcaggagaatcgcttgaacccagaaggcgaaggttgcggtgagcagagatcgcgccattgcactccagcctggacaacaaagcaagactccatttcatttccatttttttttttttgagacagagtctcgctcttgttgcccaggctggagtgcaatggcacgatctcagctcaccgcaaccaccgcctcccgggttcaagcgattctcctgcctcagcctctcgagtagctgggattacaggtatgcaccaccttgcctggctaattctgtatttttagtagagatggggtttctccatgttggtcaggctggtcttgaattcccaacctcaggtgatccgtctgcctcggcatcccacagtgggggggttacaggagtgagccactgcgcctggccagacgccacttcaaaaaagaaaaaaaaagtaatttcacctgtttctttttacttttttttttttttttaatgtggctactggaaaattttaaatgaatgatgtgattctgtggtgctcctgtgggcagcactggcctgaagcacaaacctggagcctccagcagggggcagtcctcagtcagagatcagtgagtcctcccaaggagccgtgaggcctgactggccactgcttcccctgtcaaacagctcagaccctaggtatgtactgattacataaccctggggcatgccaggcgctgtggctcacacttgtaatcccagcgatttgggaggccaaggtgggcggatcacaaggtcagtagttcgagaccaacctggccaacatggtgaaaccccgtctctactgaaaatagctgggcgcagcggcatgcgcctgtagtcccagctactcgggaggctgaggcaggacaaacgcttgaacccaggaggtagaggttgcagggagccgagattgtgccactgcactccagcctgggtgacagagtgagactctgtatcaaaaaacaaacaaaacaaaaaaaccctagggcagcaggctccccggagggacttgccttttcctacaggcgccctgccaacgaggaatggacattctcctacgtctgcttgcatggggcttcccctgcacccctcacaggggtgcccctgccaccagttaacaagacagtcactgacagatggactctggaagccggcagatgtgctgatgccttgatcctttccactgtcaaaaaaaatagccaatctcctagaacctccttgtgaactagaaggcaggaaagcttcatttgaaagggcaccagttcccgtacccactcactccccagatgaatcaggaaactcaggactgatgtttgggtatttaaccctaacccaaggtcctcagcctgactcctcagggaggacaactgatgccaggatgagtttcaaatgtcacctggctagtggggaagccctgacacctcccccaagggagccttcccctttagagacccccaacttccctctattttctctaatgcataatgggggccctgagagttgcaaagaaacgtttgacttttccaccaaaatacaatccttgcctcgtctttgtgtatctttggttttttgtggtctttcttggagatggcgtcttgctctgttacccaggctggagtgcagtggcatgatcatggctcactgcagcctcaatctcctggactcaacagatcctcccacctcagcctctcgagtagctgggaccataggcatgtgccacaatacctggctaattttttttttttttttgagacacagtctcactctgttgcacaggctggatggaatgcagtggtgtgatctcagctcactgcaacctctgcctcctaagtagctgggactacacgcatgtgccaccacaactagctaatttttatatttttagtagcaatgaggttttgccatgttggccaggcaggtcttgagaacctggcctcaggtgatctgcccgcctcagactcccacagtgctgagattacaagcgtgagccaccacactcggttaagttttttgtattttttttttaagagacggggttttgccatgttgccctaagtacaactgatctgcctgccttggcctcccaaagtgctgggattacaggcataaaccactgcacccagcccagccaattttttttaatttatttttagtagaaacaacgtcttgctacatgcctaggctggtcttgaactcctgagctcaactgatcctcctgcctcggcctcccaaagtgctggggttacaggtgattcgtgtatctttgtgtattgtgagctctctctaaatgacacctaagagatcacgattcatgcttggaggcccatcaggcagcattcctttcatttggtcatgccccaggggaaacagcaaaagcttgtcctggcctaagacaacacatgtgaccacctcaactccttgcagaagaggacacagtgcccgtgtcctccttagaatggcccaattccagatcaaccaaactgggcactgcagaggctggacaggcaggccacagcactgaggcaatggagtgcgcatgtcccagttcctgtagccgggggccccgttacccccggacattaccttatccaagagctccctcgtctcttcggtcagagggtcgtgggaaaacatgcagtcgtcaccattgatgcagttcccagtggtgtggtacagcttacacgggaaatcacgttcatggcaaattaaggtaaatgcttcatctcacagaacgcccccctcccccaccacagacccaaggcagaatccagctccctttgttttggagataagaaatctgagcccagagaggtgaggcgatgtgctaagggctgctcagtgggttggcaggaaatccacggagagaccccggcactccagactgcagggcacttccagccccactacactggctgggggctgcgtcctcagatggtcaaccagactagggaagttaaatgactcacccaaggtataaaaccacctggaagaatctcagccaatggtatgggccagtcttgagagcctatgtaaacagaacatgctccatgtgcatctcagtttactccctggaaggatgggaaagacagacccctctgagggcggacgtgagtgttaaatgagatggagactcacagaaagctcttggcacagagagaaagcacagagaaggaagattggctgttactaccaccatcaaggagcagagaagttctgcgccctcattcagaccagatgctggcactaaaggatatcgtgcatataagggcagttctcagctctggcgcaaaatccagtgatgtaaaacttgcacagttctcgcttctttgggagttcgatgtcatggctaaaattacagtggtctccctagaagagaagcaacaaaaacataaggtggtggcgtgggaagctcttgcttacttctgtctgcaaagggaagaaatactgtcactgctggtgcatggaggggccaatgacagaaacgaatcccccttaggaaaggaagacaggtgtaggaagggcaggtcccaaaggctgttgggactaattttttaaatatttttttgtagagacaggtctcactatgttgcccaggctggtctcaaactcctgggttcaagtgatcctcccactttggcctcccaaagcgctgggattatagccatgagccaccaagcctgggtacttcctgaatttaaagaaaagccttttgtccatttttcttcctcccagaccttggatgtgatgctcggaggcacagcaaccaccgtgtaaccatgaggacaaaagccatatgtttaaagatggcagaatagtaagcaggaatgagcctaggtcccccagggtacccctgaccactgcgctgccagctactgcccacccagctccagactcctggttctgagagacaaatgtctatgtgttgaagccaattttgttaagttttcctttatttccggttgaacacagtctcaacgacacaatacctaggtgaaatccaggattgtgttctccattcttcatcattcagtcctcaggaatcactcaccataaccgtgaactgaagacagaagctgatctgtcccccttttacgaatgcctattcatttgtcttaatttatttacttatttttgagacagagtctggctctgtcgcccaggctggagtgcaatggcacgatcttgactcactgcaacctccaccacccaggttcaagcgattctcctgcctcagcgtcccaagtagctgggaggctgaggaaggagaatggcatgaatccaggaggcagagcttgcagtgaggcagaacttgcagtgaggcgagatcacaccactgcactccagcctgggcgacagagagagactcggtctaaaaaaaattaaaaaaaaaaaaagagagagagagagagagagatggggtctatgttgcccagggtgtattcatttgttcttgcttatatgtatttcaagtttctcaacagaatagaaattgtaactaaataagaaatactgcccgggcacggtagctcacatttgtaatcccagcacttcaggaggctggaatcaggagtttgggaccagcctggccaacatggcgaaaccctgtctctactaaaaatacaaaaattagccgggtgtggtggcgggcaggcacctatagtctcagctactcaggaggctgaggcaggagaatcgcttgatcccaggaggcggaggttgcagtgagccgagatcacgccactgcactccagcctgggtgacagtgagacttggtctcaaaggaaaaaacaaattattttatacacaacattatttgtttgaagcatctatttcttcccaagacagatgcaggggtgcagtgtgccctgagcacacatctgctggtgtctgttgctgcctgggatactggggtaagaagctgccggctgaactaatactgggttattatacttgtttccttcagaactctgtggtcattggtccatcttctgacattgaactctgctatgaagtccaaggttaacctcatcctcccctcctcttctgtttggatgctttaatcattccccattcaaccctgaagctcaataacttcaccaggatatgctgctgctttgcattcacatcaacctccataattacgtttcaggctatatggattggttgaaaattttggccaaaaaattcccctaaaaccaaaagtcctcatcttactgggggtcctcctcactctgaaaggtaacctgagtctttcaggccgcccaggcaactcccagtatcggcaagtgtccacaaggacaaggactacacagtcactcccacccaccctcaccacggctccagaaccttctggaagccatgtgtcctctgggggctatggcctcctagaggtgcccagctttcagcgctccttacccaggtgcagcgcccttccacgaagtacttgcaaatgactttgcctttcttgtccgactgctggtggggcttgtcatggtcacgactccggtagcttccaccaccaccgtcctgcaatggacagggtgtggacgtaaaggggaatgaaagggaagggtagagatgggatcggggttaataagaagcacgggagaaggggatgaggggtcccttcagatctcacaagagcaccgatgggcaggctgcatctaacacggaggctgcgtgcaccttataagccccacggtgtggggtgttgctgcctggtgaggaaaagctctagcctttagagctgttagccacttacacctcaagttccacacaactgtgcaggaacacgtccaccacacccagaggtggtggcatgggtctccctgcaaaaccttccagggctaattggatggttcacctagaaccttctgaacctcagagatgtgttaggtatggctgcaggtgctgctaatgacatggttttaaacacagggtctcagcagcagcgcatctccccaggataactctagttgtcgctggttatgctggtcaacactggccagccctttggggggtggctgatggcagcaaggatcagcttcacagaatgactcattaaagggaaaaaggactaagaagggaccttggcccaaacatcagatcagagtggagtcaactcacgcccatgtcctcgtcatagaagtcttcgtcatcgttcattccgcccttgttcatccctcctcggctgccacctcggcctcggccccgacccattcctttccctcgacctcgggagcccctgccacggcctcgacttagccctgtggaggggagattgtgtgaagacctgctgaccaccccctcccccacccccaggactagattccagcagctgctggaatccctgccccacccagcgtgtcctctccaggcccctgcccacctcggcctcggctgtccttggagcggcggtactggttcagctccttggagtactcgtcatagtcgtcgtctcccattggctcctcactctctccatactggaatgcgcagaggagagggcaggagagcgtcaggtagggaacaatgaacactgtccccacctacacactgctcctttttgaaggatggtgaccatccaggggactcataccataacccgtttccacacagcctgacgacaggtggtcccaatccttcccactgcagtcttcactgtgaagacctgacccaataggcaaacccagcatggagcctccctacgtacacatcactgtggggctctaaaagggagtgggcagtggactgtggactggcgtggaaggtctgtgggtaggaccaggatggcaagtgcagtgcacctgccgctcctcctcctgggtcgggacagggatgaaggaccacgtgcctggctggaaatgtctctagaggactttcaggaaacttctctctagtgatgggatgttttcacagcacatcctgtgatacttcttctttttctttttttgagacagagtcttgctctgtcgcctaggctggagtgcagtggtgcgatctcggctcactgcaacctccacctcccgggttcaagtgattctcctgcctcagactcctgcatgaatagctgggactacaggcgcgtgctaccacacccggctaattttttgtatttttagtagagacagggtttcaccgtgttagccaggatggtctccatctcctgacctcgtgatccacctgcctcaggctcccaaagtactgggattacaggtgtgagccaccgcgcccagccgataccttttctactttaaaccacgtgaaggttttatctattccaaaatgataaatgaatatttttaaacacatacatctgcgctctgaggcttcccttccttcagaagggccgtatgtcttcctaccttggcctcacagcctctaccagcagtgctcacgccccggaaagcccaccagcctcaccccgacgtccccagggccagaggaaaccttacgtccatctcttcctcgtagaaatcctcttcatcctccgggtggtctcctcccatagagcctctgcccctgcctcggctgcccctgcccatgccgcggcctcgcgatcctccacggcttcctcggcccctgtagccccggccccggcctcggctgcctgcatggagattcagatagtgagcctccagcaggagcagatgccaccagcaagaaagaagacaacccacattttgctcctgaggtcaatcacttcagctgcctcctcctccttctcctcctcctcctcctccaagaagccttcctagatgccccaggtaggctactggaccctctggttctctcaatgggggtccctcagcaccccagacacacagctactccagtactcactccccttcctcacagggacttgtctacttagaactgcactgtccaatatggcaaacaccagcccatgggctaatgtgcaactaacacgtctggtccaaactacaagatgctagccttgaagtctgacaagacaagctagccctgtagtttggacctgtgatttagacaagactccaaaacacacattggacttcaaagacttagttaaaaaaaaaaaaaagaggctgggtgtggtggctcatgcctgtaatcccagcactctcggaggctgaggtgggcagatcaccttaggtcaggagtttgagaccatcctggccaacatggtgaaatcttgtttctactaaaaatagaaaaattagccaggtgtggtggcgcacacctgtaatcccagttactcaggaggctcaggtgggagaattgcttgaacccgggaggcagaggctgcagtaagctgagaatgcgccactgcactccagcttgggcaacagagtgagaccccgtctctcacacacacacacacacacacaaaaaaaaacccaaatgagaaagaatataaaatatctcatttgtctaatttgattacacgttgaagtaagattttaaacatattaggttgaaaacagattatcaaaattaatttaattggtttcacttttttcttcacttaaaaaaaaaaagagtggccaggtgcagtggctcaatcctataatctcagcactttgggaggcccagttgggcagatcacttgagaacaggagttcgaaacaagcctggccaacatagcaaaacctcatccctcatctctactaaaaatacaaaaaattaggccaggcgcagtggttcacacctgtaatcccagcactttgggaggccaaggcgggtggattgcccgagctcaggagttcaagaccagattgggcaacacagtgaaacccatctctactaaaaataaaaaagccaggcatggtggtgcaggcctgtaatcccagctactggagaggctaaggcacgagaattgcttgaacctcggaggcggaggttgcagtgagccaacatggtgccactgcactccagcctgagcgacagagtgagactctgtctcaaaaaaaataaataaataggctgggcgcggtggctcacgcctgtaatcccaacactttgggaggctgaggcgggcggatcacgaagtcaggagatcgagaccatcctggctaacatggtgaaacctcatctctactaaaactacaaaaaattagccgggcgtggcggcaagcacctgtagtcccagctactcaggaggctgaggcaggagaatggcatgaacccgggaagcggaggttgcagtgagtcaaaattgtgccactgcactgcagactgggcaacagagcgagactccatctcaaataaataaataaataaataagctgggtgtggtggcacatgcctgtaatcccagttacttgcgggagtaaggcacaagaattgcttgaacccagccaggcgcagtggctcacgcctgtaatcccagcactttgggaggccgaggtaggcggatcacgaggtcgagagatcgagaccaccctggtcaccaacatggtgaaaccccatctctactaaaaatacaaaaaaagccgggcatggtggtaggcgcctgtaatcccagctacttgggaggctgaggcaggagaatcgcttgacctctggaggcagaggttgcagtgagccgagatcgcgccattgcactccagcctgggcaaaaagtgaaactctgtctcaaaaaaaaaagaaagaattgcttcaacccaggaggcacagggtagaggctgcagtgagcctaaatcgtgccactgcactccaggatgggtgacagagcaagattctgtctcccaataaacaaaaaagagtgatgggatctcgctgtgttgcccaggctggcctccaactcccgggctcaagtgattctcctgcctccacctctcaagtagctgggactatccagtgtccttttcactttttaaatgtggctaccagaaaatataaacgacatggtggcttccaatctatttctacttgacagcactggcctaggatctccccaaagcacaggggctgccccagggaggtatccaagaaagactgctagaagaaccaatgggccgggcgcggtggctcacgcctgtaatcccagcactttgggaggccgaggtgggcagatcacgaggtcacgagatcgagaccagcctgaccaacatggtgaaactccgtctctactaaaaatacaaaaactagctgggtgtagtggcacgtgcctgtaatcccagctactcaggaggctgaggcagaagaattgcttgaacccggaaagcagaggttgcagtgagccgagatcgcgccactgcactccagcctggcgacagagcaagactccgtctcaaaaaaaaaaaaaaaaaaaaaaaaaagaatgaatgaacagctactcaacaagctgggcctcaggcagggctcacaagtctgagaacccctgcactggaagattccagaagccattctcaggctgggcagtctttctggcaggagatggttcaatggttctttttggttgctgttgttggtcaggctggtctcgaactcctgaccttaggtgatccgacagcctcggcctcccaaagtgctgggattacaggcatgggccactgcgccggcagagatgtgttctaagaggccagtcagggctaccgtgtctctggtgctcaagcctcctccaccttcctcccaaaggacacaggttcaaggttcagaggtgtggcagtggcaaggactgcagtcacactttgtcaggtgatggggctgggagaatgggggagcactgctgtggggtgtggcagccagctgtcagtgaccatggcccaggtgaaagagaagctgttcccttctccccccacagctgaccaggaagtgacctttcgggcacgctggccttctccctgcctcacaccagcctggtaccaccccaaccacagcccagcgggtgatctctccggtctcctgtgccatgcacatgcagagcctggcccttctttgtacacttatcccaaccctaagtgaccaaacttgaggttctgtgagaccaggccaccggggttggcccgggtggctccgatgccccagaggagaaactgtaagggcagggctcacctcggccgcggctgctgccctccttggcacgccggtactggttcagctctttggtgaagtcgtcatagtcctccttgcccatgtcctcctcctcgtcgccctcatattccccatactgctcattctcgtagtcctcgtacatgccataactcttgctgtccatcttggagtatgccttcttgggcaggggcgtggcatgcgatggggggtactgctggtgggactgcgtcccagagatggggaaaagaggtgagccggatcccacagccgtgggtgcagactaccaagatacccagggttccctaaacgaacatgtctgtctgggtgtcactactgtcccagggttgcactgctggtctccagcccctctggggactggttctcgtaccagggagtgggagtagcagcgggcccaagtgtttctgttcttcataaagggccagaactagaaagaaaacagaaccacagacccccgatccctgatgaacaaaggggagaagaagggagcatttcccaaggatgcagagcaagcgcacgtggaggggcctgggaagcaggcgggggctgcttggtcacaattttcctagggccctggaattcaataaatggcctgcttggcagccaggctggacagccatctcaaatgatgctttccaaagtgtggtaatgccaagtggtactagaagaagttaaagatactcataaaaacggaagcaaccaagacatccttcaacaggtaaatggataacaaactggtatatccagacaatggagtaacgacgaatatgtaacaataaagtgtgtattgggcaaaacccagagaactatacaaccctaagtaataacaatgtatcaataccggctcatcaattctaacaaagttaccacaacaatgcaagacattggtaatgggaaactggaggcagggaagggggcaggcagaggggagaagggaactctactactacctgctcaattttgaataaacttaaaacagctctaaaaaagaaagtcagggggctgggcgcggtggctcatgcctgtaatcccagcactttgggaggccgaggcgggcagatcacaaggtcaggagatgcagacgcgaaatgcgatctctactaaaaatgcaaaaatgcaacaacaacaacaacaacaaaatagccgagtgtggggcaggcacctgtaatcccagctacttgagaggctgaggcaggagaattgcttgaacccgcgaggcagaggttgtagtgagcagagactgcaccactgcactccaaccagggtgacacagcgaaacaacaactcaaaaaaattaaaataaagtccgggcacagtagctcacacctgtaatcccagcactgtgggaggcccaggcaggcagatctcttgaggtcaggagttccagaccagcctggccaacatggtgaaacccagtctctactaaaaatacaaaatgaattagccgggcatggtgatgggcgcctctaatcccagctactcgggagactgaggtgtgagaatcacttgaacccgggaggcagaggatgcggtgaggcaagattgcgccactgcactccagcctgggcgacagagcgagactctgtctcaaaaaataattaaaattaaaaaaaaaaagttgggccaagcgtggtagctcacgcctgtaatcccagcactttcggaggcaaaggcaggcagatcacaaagtcaggagttcgagaccagcctggccaacatagtgaaaccccgtctctactaaaaatacaaaaaaaaaaaatttgccaggtgtggtggtgggcgcctgtaatcccagctacttgagaggctgaggcaggagaatcgcttgaaccagggaggcggaggttgcagtgagccgagattgtgccactgcactccagcttgggcgacagagcgagactccatctctaaataaatgaatgaatgaacgcataaaaaagtcggctgcgcatggtggctcatgtctgcaatccccgcactttgggaggccgaggtgggcagatcatttgaccccaggaatttgagaccagcctgggcaacattttgaaaccccatctctaccaaaagtacaaaaattagccttggcgttatggcccatggttccagctacttaggaggctgaggcaggaagatcacctgagcccagggagctcgaggctgcagtgaggtgagatcacaccactgcactccagcctgggcaacagagtgagatcccatctcaataaacaaacaaacaaacaataaagcccactaattttaaaaaatccgaattatagaaaaacaggacaatgcaaaatacagctagacacacagacacacatacaagtactttagcagatctttaaaatgcctccagctctagttcataaaaagcacgcaatgttccctccatttcctgcctccctcaggtttgaaggccaaacctacaccagtagatcaatctcaactatggtattggacaatgaatcatttgttgtgatggatgatgctgggtcatgggatacctgggacagctttaaagacctactaactttaaaacatttctcaaccagccgggcacggtggctctcgcctgtaaccctagcactgtgggaggccaaggcgggcgggtcacctgaggtcaggagttcgaggccagcctggccaacatcgtgaaaccctgtctctactaaaaatacaaaaatcagccgggcaaggtggcacatgcctgtaatcccagctactcgggaggctgagacaggagaatcgcttgaaccagagaggtggaagttgcagtgaaccgagattgccccactgcactccagcctaggcgacagagcaagactccgtctcaataaataaataaataaataaataaataaataaacaaacaagacaaaacatttctcatccaaacccggacacccacgtgccaacgaatactgggtaaagtaatcataagatgatttgcggccgggcgcggtggctcacacctgtaatcccagcactttgagaggccgaggcaggcggatcacgaggtcaggagatggagaccatcctggctaagacggtgaaatcctgtctctactaaaaacacaaaaacttggccgggagtggtggcgggtgcctgtagtcccagctactcaggatgctgaagcagaagaatggtgcgaccccaggagacagagcttgcagtgagctgagattgcaccactgtactccagcctgggcgacagagtgagactctgcctcaaaaaaaaaaaaaaaaaaaaaaaaatgatttgcttttctcttatgggattttctgggggaagaaatggtatacaaactgaacaaataatttaaattgctgcttgaaatgagagcgacagtggctgagtatctaacctctgcctactggctacttgagaacatttcattctcttgccaatttcccaaaaaggtcatttgtgaacagtggaagccagtcagccgtgacgtggaccagtcagcatctttctctgagacatacagggccttgctaaggccgcatggaggaggctcgagaacatgcctcatggaggtcagctagggcctgggttcaaatcccagctcctttacttcagagagctgggcaaccctgttgaaattttcttttccttttgagacaggatcttgctctgtctgtcacccaggctagagtacagtggctgatcatagctcactgcaaccttaaacttctgggctcaagggatcttctcacctctgcctcctgagtagctggaactacaggcatgcctggttaatttttttattttttgtggggtctcacttggttgtctgggctgccttgttgaaattgtctaagtttcagtttcctcactcataaaatggggattaaattaatacctgatggcccaggactgaaactcacaaaaaatgcccagaacacagcaagtgctcaagaaacacaagcagttgaactcctcccggccccagagctcagcagtgcatgccagtcactcaccggcgcatatggggggctgtactctctgtacttgcggtgacctttctcactggggctgaaatccgagtcatctgagaagtcagagaagtcatcgctagaagaagcatggcgctgtaatgacaggggaaggagactcagcaacctgccacaggcaggccactcgggcacagtcagcctcaggacaaactatgctggcatgtgccgcagggctctgcgcttcacctgaaacacctcacctggggcacttagtggcaatgaagcataagctaccaactcttttaaaaaaggtctttatccaatttgagataagcaaaggcattaagagtgccctctggggtggacagcaaaagctcagcccctggggctctcagccaggcccaatgccaggcagtggcagtcccaggggatctccgacctactttgtgcttggatttcctcctcttcttcgacctccttttctctttctcccgctctttcttccgtttccgcttcagtctcctgtgggacttctcctcatccgaatcactgtgatgcttctcccccttttctttccggcttctctcaggccctccggaggtatcctgggtctcctctgccccatcatcttccaattcaccttcttccaactctccatcttccctacaaacaaaccccaatcccaccatgaacacagggtttgagaggagacctcctagggctctgggctggccaaggctgacaggaaccgaaggcctgactgctgtgagcgaagtgagaccctgggaggacatgggggccatggcctcttgttccatcccttatcctccccctgaaagaactgtgcttgctccagtctaacctggctgggggaggggtaggagtttaagggcattaccactaacaccgggacacatctacgccagatttcccaacagaactagtgttcttagaagaagaaaccgacaaggtgctgtggtcacataagcaggaagagccccatcttggggattcataatgcttaacgctgcacaacttccaggaagccccatagtccagaaacccacacagctctgctgtgaagcacttggggcacttctaaaccttgcttgaccacagaagtctctctcccagggagcacagacccacatcccctccctcccaggcccaggattgcctgctgggccccgggccccagtgagctgggcgtcagtgccacctgaggctgagggcggtggctgtgcaccgtggagagggccttggttctgaaccaggggtggccccaagctacctgggacccacccacaggcaggcctgggctgtggcctgagaaccctccaagtactttattacaaaagccccatgagaaccgctggaaacaggctcagagtcccaggtcacaaggtctgacccaccctcgtcagtcccacacctctaggccggaggcaagcaaacactgagcagctggaggaggggggacggatcccaggcccctcctgagggcctcacatgataccggccctgctttctctccctcctctgactcacctccagatagtggaaccccttctggctccccatcctacactcttccaattcccccgtgtcaccccaatctccaggactttaaaagtgctctccaaacatgacagacactgcccagtggacattctgcatatgtaaatatctatggggtggggtaggagtgaggaagaaattgggttcaggagggggaggctggaaaaagaatccagtttttgagccaaacccacagacacagtgttcacaagtacaggagttggtaaaggaaaaaaacaatctttttgaataattttaaaaagctcccaaagttccccatgaatgaccacaaaaaggcttgcgtgagagcatccaactccttccgtctcaattaactaggacacaaagagaagtgatgtaaggaggaaacatcacgagcccaggccccaaaaggttagccacaaatggagctatctctgcggaaaggcccgcagctgcccaagcgggagccaatgtattaggcgtgcttgcctgaaggttccagggcatgtggcagactcctcctcccaggaccctccactgtcctttcgcttatgtccctccctttgtctgccttggggctgctacccaaacatcaaggagcgcctcaagagcagctttttctatgaactctcactcccagttcaaaggggatgggttctatttcaaacccaagtggcccagccccacagatacccctgggcagaggtcaagggcaactctcaaaacagaatgcaggacacaaaactctttctgctgcttcaaagtcaacaacacaggtgacctgacccatgtgcaccttgtgttgcttccccgactagcaaacttggaatggggcgggggtgcaggctgcagtcctgacaagggaggtgccttcccgctggggtgcggcccacagaaaccaggcgtggagcaaagtcctcactggacacctcacccacaccgaaaagggccacatgactgggaaaactggttttgtcccaagggagaagctgttactcagtgacatggcaaactgcccgccgccaggagctgtgcagacactgggaggtggcaccctgatgggaatactgggggcaggccagggccacacctcaagagaaagggagagacggacagactgagcgggagaaggcccgggacagactggaggtatacatgctggggttccataaagaaaagctaagaacaacattactctcgacacttaagtctagaagggataaagctgagagggacatgatcaccacccaggccactaatattttaaatgccatatctgtgccaggttgcttgactacctccttttctgcactgacaagaaacttggtccacaaggcaggtgcctgatcatcagggctgggtcagctgagccggagtgggtggcagcctcagcacgccctcccttatgtccaacaccgcggcacagcaggcgacagtcttgcccagggtcagctgaggcctccttccctgtcctgatgccactcgctggctcggacgaaggtacaggctactctacatctaacacctgcgggcagaggacaaaagaccattcaaggaactccaagagccttaaccatcatccagaatgattctagaaaggaatcaccaaggtagagaagtgcagcattcaaattcaccctacaaagacctgagccaaagagggattctgcacattatcgatattaacagctccaggcacatctgggctcaaagagaatcaaccatacaacttttcacaaaacaggcagtgactacttgaaattttgtttccctaaagttgagagaggcagagaaatacataggatttttttgttgttgttaaactgctgacggttgataaaggggcactgagacagcaacaataaacagatcactgcattctcagggccctctggccatgtcaggccctcaagcccctccgagccctgggctaacttctgtccacagtcacctcaaggggtcccccctcacgacacccaagatgctctcctagctaaacgtcctgcgtgaacacgaggtcttgactatattcttcagactctgttcaacagaaagcaaaaagaaaggaagtcgagccaaatgggaatcccgtgggccaccagcgcgacggcacaaaggcggtctcaacaaaacagcaaccaggtttcagcgatgccacttaacagactgccggcaaaatccgtgtcagagtgggattaaatgccaagggaacatgcttaatagacctcgacataatcccccaagaaaagtgggggaagccccaccgcgctaatcatttcaatctagacctgccaaactctcttgagacaagcaagcaggagaaaagcctgccgtggcggcctgtgcagggagcactctattcccagagcctggattggcaacgcctgacatggctgcactcggtccgctgcccagagccctcgggaacaagaaagcaaccaccctgggagaccgacttggaactggcccccatgaggaaatgggaagaggccaacgccttgccttgagccagtcctgccccgtacctcccggacaaagctcccgggtatttcggttcccattttcagcactggctgctcctccccctggtcaaagaacagatctggacgcccactctaaggaacaggccaactccacagggcccacaaggatgctgggttcagcacacaccacggacttggcaaaaacagtgcttggtaaagacatttcatgttcagaccgggtgtggtggctcatgccttcgggaagccaaagcaggcagatcacttgaggtcaggagttcgggaccagcctggccaacacggcaaaaccttgtctctaccagtaatacaaaaattagctgggcgcgatggtgggtgcctgaaattccagctactcaggaggctgaggcacaagaacttgaacctgggaggcagagattgcagtaagccaagattgtgccattgcactccagcttgcgagacagagtgaaactgtgtctcaaaaaaaaaaaaaaaaaaactaatcccagcactttgggaggccaaggcaggcagatcacctgaggtcaggagtttgagactagccttgccaacatggcgaaactccgtctctactaagaatgcaaaaattagaccagtgaagtggtgggtgcctgtagccccagctactcaggaggctgaggtaggagaatcgcttgaacctgggaggcggagattgcagtgagccaagatcgcgccactgcacttcagtctgggtgacagagctagagactcggtttcaaaaaacaaaacaaaacaaaagatatttcatgtccaaagtagacatgatatttcaaaggagatatttcatactgcctcatccagcagcctacagattcgggcctcatgctcctttctgcagaccaagtaactcaaccagctccacctcttctctggagtatgctcttagtctgtaacctgagccttgcttttctgatctactgaatgggataacagcagcacctatctcaagggctgtgaaggttaaatgaaataatagggataaagcccttgacatgaggaacaggcacaaaggaagaagcagctgttggttttaaaaaccagctagcatgagggcatctctccacggaaagccctaactggctggaatgctaagtgggaagcatgttctctataagaaagctacagccagggccgggcgcggtggctcacgtctgtaatcccagcactttgggaggccgaggtgggcggatcacctgaggtcgggagttcaagaccagcctgaccaacatggagaaactccatatctactcaaaatacaaaattagtcgggcttggaagaacacgcctgtaaacccagctactcgggaggctgaggcaggagaatcacttgaacctgggaggcggaggttgcagtgagccaagatcacgccactacactccagcctgggcaacaagagtgaaactccgtctcaaaaaaaaaaaaagaaaaaaagaaagctgcagccagctctccctgacggacactgctgactgctggtcaacaagttctttctacttggtcacaaccacacatacactgttctcccaagccatcctgctgacaaaactgacaaaagcaacatctccccttcctcagctctaatctaggcagtaccagaagccaccaagtggctaatcaagacaaaaaggcgtagggagagctgagccccgggaaggaacaaaggcttcttacagaaatgaagcttggcaacatggcagctctctagacaagagggttggacgaaagctgaaaggggcccagggtttatggatcaacctggtttacaagagtttaaaaaaaaaaaaaaaaaaaaaaaggcaaagtacaacacaaaagatggaaactcatgggaacagcagcggttaccttaagatcatgagagcccttgataagaggcggctaggttaatgtgaaggtcagggttatgatcattaactgcccagactctcaacaaattgcctgggtaggctctgaatgacccattaactagggacaaaatcacaaaaattacaaggaggcgccgcctcttcaaatatttaacaaccagcctaaatgcagaagtccaggatccccaagtccgattctgcggactagtcgtttattaggattgaaggcgcagggcctttgcttcagaaattcagctcagggctcatgccaaagaaaggcccgagaccttcccttgagttaggacgtaatgaagcagccataggggaaacctcacggagggattttcagagccaggaaattcttgaaataaacctctgggtcttgcacatgcttttcagtgtccttactacctaggttcatcaaccagaaaccaagaacaaatgtgctctgtctccttttcttcagcattctcaggtgtcatcatagcctgctctgtgacatcatgccatttccatggtaacgtgcctacgccacggcaaccacccaagtgagacacaaaactggcaaagagaagtccaggcatcagcatctgtaccctgtaccctacaccctcacttcaacataagacagtctacccactgctggcatctagatacgaagacacctactggtggatgtgacgataggagaaattggagccatctgaacccagcctgggtatttgagatattaattgttaatcttgttagaaatgagttttgtagaaaggttttttgttttgttttattgtcttttcttttgagacggggatcttactctgtcgcccaggctggagtgcagtggcgtgatttcggctcactgcaaccttcgcctcctgggttcaagtgattctcattcctcagcctcctgagtactgggattactgacacctgccaccgcgtccagataatttttgtatttttagtagaaacagggtttcgccatgttggccaggctggtctcgaactcctgacctcaggtgatccgcctgcctcagcctcccaaagtgctgggattacaggtgtgagccaacacacgcggcctgtagttatgtttttaaataatcataaagttagagattcatactgaagaatctacaggtataggccagacacagtggctcatgcctgtaatcccagcattttgggaggccaacaggcggatcacttgagccctggaatttgagaccagcctgggcaacatgaggaaaccccatctctacaataaatacaaaacttagcctggcagcatgtgcttgtagtcccagctactcaagaggctaaggcgagaggatcgattcagccaggaggtcgaggctgcagtgagctatgattgcaccactgccctccagcctgggcaacagagtgagaccctgtcagactgcttgagcccaggagttagagaccagcctgggcaacacagttagaccccgtctccacaaataatttaaagacagggtctctctatgttgcccaggctggtcttgaactcttggactaaagcctgccttggccttctcctgccttggcctcccaaagttctgggattagaggcatgagccattgcacccagcctctataaataactaaaaaaaattttttttccataataaaaagttaagaaagaaaaaagttctggccaggtacggtggctcatgccagtaatcccagcactttgggaggctgaggcgggcggatcactagatcaggagttcgagaccagcctgaccaacgtggagaaaccccatctctactaaaaatacaaaaattagctgggcgtggtggcgcacgactgtaatcccagctactcaggaggctgaggcaggagaatcacttgaacctgggaggcagaggttgcaatgagcgatcgcaccactgcactccagcctgggcaacagagcaagactctgtctcgaaaaaaaaaaaaaaaattagccgggcatggtggcacacgcctgtagtcccagctacttgggagactgaggcaggagaattgcttgaacccatgaggtggaggttgcagtaagctgagaccatgccattgcactccagcctgggtgacagattgagacttcgtctcaaaaaaaaagaaaaagaaaacaagaacttccaagtgggacaactcagcaatgtgaggagaggctgcaaggtccccaagcagttatttaataatttcccagcagagagctggaatctgggcttgcaggcctccacactcctcaccaaggcctaaacaggctcagagacaagaaggaatttgcccatggggtcacagcaggaagaagcagaactagaaactaagtccagtacttttggatgcaaagaccagctcttaacctctacaaattatttgacaactacaaattatgtcaaaaagagtaatttgctaaacaggtcaactgacaaaacaacgcccaccctgaaatgtataatcgagtagggaaaaataagatatacatacataaaacagacttcatgaatcagtattccaagaaatgccagaatgaggtaccaagactttgggcaaattccttaaacactctgcaccccagtctccataactgtgcagcacaggcaaccatggagtccccaggatggtgtcatgggagaatcccatgaggccatgtaacacaagcacttagcaggaaccttgcccagaataaatgcttaggagtaaaacctacccaaacacaaagacacaaggccgatacggtccttccaatatcaagtgaaggaaatggtagcatttcaaaaacctaaccaaagacatctggatagagaataagggctcatggaaagaccgaaggaattctggcaaaaaaaaaaaaaaaataggactcatcccaacacaaagagaaagcaatacaaaaatcccagggagtgaaattccaaagtcccctaatatgaaacgaatgccttcgcccccaagtgtgcagtgtccactctggggtttgtccaagcatgcaaaccacttaggcagaacatttctgtaaagcttcaaacaggctgaccgtgaaaaaacccagcctgctaaaaggaagcttgtggagacaaagatgccattttttttgcctgagtatctattcttccactcccacgagctctgaaaatttgcattcttgagcaaaggtatctatccctcagatccaagttactcctggcagatgaacctctggaatttgcttctcagcaatgaagagttttctaaccaccttctcatgccaactaagcttcagatggtttaaagctgcaaagatcatggttttcatcagaggaccgatttctatcactccagaggagaaagtctaataatttaacttatgaactaagacttctctttgtttataattatttatttatttatttctacacagggtcttgctctgtcacccaggctggagtgcagtggtgtgatcattggttcaatgcagccttgatctcctgggctcaagcaatcttcccacgtcagcctcccaagtagatgggactacaagcatgcaccaccatgcccagctaatttttgtattttttgtagagacagggtttcaggccgggcgcagtggctcatacctgtaatctcattactttgggaggacaaggcaggcagatcacttgagatcaggagttcgagaccagcctggccaacatggtaaaaccctgtctccactaaaaatataaaaatcagcccgttggccgggcacagtggctcatgcctgtaatcccagcactttgggaggacgaggcgggcggatcacgaggtcaggagatttagaccatctgggctaacatggtgaaaccccgtctctactaaaaaaaaaaaaaaaaaaaaactacaaaaaaataagccaggcgtggtggcaggcgcctgtagtcccagctactcaggaggctgaggcaggagaatggcatgaacccgggaggcagagcttgcagtgagctgaaatcgtgccactgcactccggcctgggtgaaagagcgagactccgtcttaaaaaatatgtaaaaataaaaataaacaaataaataagagatctgggcctaagattcttgagatttgttcatataccacctaaagaatttcttagccaggcgcagtggctcacgcctgtaatcccagcactttgggaggccaagacaggtggatcacctgaggtcagtagttcaagaccagcctggccaacatggtaaaaccccatctctactaaaaacacaaaaattagctgggtgtggtggcgcacacctgtaatcccaactactcaggaggctgaggcaggagaatcgcttgaacccaggaggcagaggttgcagtgagctgagatcatgccattgcactccagcctacgtgacagagtaagactctgtctaaaataataataataataatttcttaaaaagaactgatacaacctattcgttaatttctagtcacctgtgggttccttaagggcagacaagaatgaggttcacagtaaccccacatttccaagggcccagcacagggccaggtacagattgggtacatgctcagtgcatattctatatgaagtatcaatctcagctctcatacccttttggtcaatttcatcaatagaaacagtaactaatttccaagaaaactttttcagcaacctgtatcacttaaaactttgacacaaactcattcaagtgtttatcaagggtttccaaataagcttgaaagtgatggatgcacagactgaacagaggagacaggccctgcctcggatgcagcccacccgtgtggcccacaagcttcagttactgtgactgctctcgttccccgtggagtggcagggcctgcctggaatcccaaggaaacctaagccctggtgtctgttaggaaaatgaggagggcaataatccaagccacctgcaacagacttttggccaagcgacactagcgtctgggcccagctccctcggttaggccatagcagggatgtaatggccatgatccacttccacacgggacctcaagaagtctccagttacttctaatgaatgaaaatcccttccatttaagagggtttaaaagcctaggcttgggcctctacattcactgaaaggagtggaacgcagggagaatggagccacagtggactgaggaaacagttaacacccccaccctctcgagggccaactttaaatggaatatctatattccctcctcattccttcccaccacaaaaaaaatgacaatggctgctgtgcaggcataccagacagtgcataccatatcacgtggtgggcagcaactttctactcaactctgctgctgtaacgtagaagcagccactgatgatataaatgaatgagtatggctgtgtgccaataaactttacctactggccaggcgcggtggctcatacctgtaatcctatcactttgggaggccaaggagggtggatcactcgaggtcacgagttcaagaccagcctggccaacacggtgaaaccccatctctactaaaaacacagaaattagctgagcatgtggtgtgcgcctgtaatcccagctactcaggaggctgaagcaggagaatcccttgaaccaggaggcagaggttgcagtgagccaagatcatgccaccgcactccagcctgggtgacagagcaagattctgtctcaaaacaacacaaaccaacaaaaaaacactttacctacaaaaacaggctgggtgggctggctttggcccgagaatcatagtttgccgacccctagcctggatgcaacggctttcacactttttgacactgacccacatctgcttctttgcatttctcccaaacaaaagtttccagaagccacatttaaatgcattctgctttttctctcctcttccatttccttggttttccaatgcaaaagaaaaagatcaataattggacttcatatcccactagtggctataccccacagtctgaaaaatagcacaccagatccaccacagtataatggtatgtatagagatggggtctgagtaccagccaccccgggttctaactctgcctgcagcacacacttgttttgtgacctgggacaagtgacttcacctctctgttttggtttctcctcaaacagcagaggtaaaggttaaatgagctaatgcatgagaagcactcagaagggctctggcagataatctttgaccttcaggtcaattgtgcacaaatggcactgttgccccttcggaaagacaaagacactgacttaggagatgaactcaagaatcacatccagtttgcctaactcccccaaccatagctgtccaccacccatcactctcagcagagggccaatcccgtgtggagagaacatggcagcacccaggcagacatggtggcttatacctgtaatcccagcactttgggaggctgaggtggaggatcattgaagccaagagttcgaggctgcagtgagctattaatactatgaggtgccactgcattccagcctgggcaacagagcaaaaccctgtctcaataaaagagaaaaaacaaagcttttggctctggagttcactctatcctttctgggacaactgacaggcatgaccaggaacctgatgggcctgcctgtgatctagccactgagcctaaccttcaaattaattaaggcatctgctttccaagtgcatattagtaagctgcaagcagcagcagcaaccctttatcgtggccagaaactgtagaaggtaggccagacacagaggaagggaatacgaagcctggtaaaggcagtaacaaccctagcccgactctaaataaagtcttcatgatagaagggttctctgcacactcagaaaactcttgggctccaagaaaagccggggaggaactcagttactgaatgaacaaaaccttatctgactcagccagatcccaaaggagtgaagaatcctggagctggatgagaccttgttcattcccctctggagagagtaaaggacttgcgtggggaaactgactagtttgcagtggtatgagattctagatccctggcttcccagttctcagaagccctactgagactacagcactgactcggactctaattgcaaaagatgaacacaggaggtacagtcagcattaagctccagacagtatgaccatttgagcatccataaaaagacactgagcaagcaagaaatatcttaagatggcttccacttagtgtcaaccccaattggctccctgcaattaaataagctgaccagaaccctaagagatgaaagataaatgcacttccttcaaaaatagatgttattcttacttctgtttatacaccaactgtaaaagttctgtttcaaattcttctctagtagggaaagcaggaagattcactgaatgctggcattgtgtgggtgtccccaaatgcactcatttgaccacaaggaccctgagaagtgggcattttatactcgatgcctactgcacactgccggggagaagccaggcctgaacagttttatctggctccaaagtccacagtcttcctccacatcctgttgccacctccgacattcaaaaagatgtcaccacttgcctgacaaacagggcactgagtcacctattcacacagatgcgaaatggcaaaaaaaatacacgagaaagatcctttatgcagaccagtttggccagaagcagcaaactatgctctcagcaaataatcctgcgttctgttaagaaaaaaaaaaaaaaaaagtaacaggacacaactaaatctagcaccaaccaagaggccgtatcttcatttttgtcaacaactactaagagtcaccccaatgggtgatgtgccagaaatctatttaaaataaactgcctatcgcacctcattacatcaccagtgaaactgtacacaatgtcttcaaaactgcatctgcattaactcctaaaagcaaaagcgttctgcagcaaagacaaggccaagaaactgggagtcaaacccatgaagtttggctccccccaatcaatctcatttttactttaacttatccccatgaacttgacatgccacccagacaaactggcagcttttccatcctattaggttttaattatgaaactggcttcataccatgttattcggagaggagtccctccaccaatgaggctgctcctacagtctctgatctgctgaataaataccaattgccagaaatctcaggagtcatccttttttcttagctgtgctgccaaggcacaggttaagcgcctggctcaattcagctactttgcttgctattcactctgtcactcaactctcggtgtgaatcggacccagttgctctggcactagaattactgttcgtggggaccaaaattaagttctctagaatctggtttgacttgatagctatccacggagacctggaaatagtttcattagcaattttcaccagaggtatttactgtaactggatctgacctctatggagagatgtttctacaggcccaatagccataaaaatgtaacaaaaggaagtgaaggaccctcagacagccatttctctcccatcagggaagaaggtaaaagatctaagagcaagaagcagaggtgtaggcaccgttaaataaattactaaccaggcccaatatgaaattgctctacattcaactgtatggaaacgcaagagtcaaaaccgttcatctttaacttgccaggcagttgaacagccaggtccacaggtacaaaacaattctcccctgggatcagccttcctggctgtggaaaaaccacagcagtggcttactaaaatagctggctctacttagagaaaactatggcttataaagaaatcaaaaatttaaaccttcagagcagagcaaaattgtacctgggggagaggacaggccatgaattagtcattttggggaaccgcatttttttcttttaaagagcaaatttgaggggaattaaaaaaataaaggagttttaaaaaataaaggggttttatgacgagaacatccatatttccatggtcacaacagactttttttctactaggagactttgatttgctttcaagttaaatctctcacccagagaaaataaaaatgtaaaagtttgtaagtgtataataagatttgttattaaatcagggattctgagtgacacccttttctttttttttgcaacatccattaatttgatttttaactaatactggtacatcagtctggggggaaaaaaggcagtactgtgacatttcaaaaacagattaccaaaatacagtttttgacttaattactggggcttctaggtcttaatggatgagatttctttgagaatggaaaacaataaaccgttgtgttgacatgcctgtgagctttttaaatgcttggggaaatagtttcaaattcactgaacattgctaaaaaatttcacttacaaaagaaatctcatttccttaacgtttctttttaaaagtcaatttaaataagcaacttagtagcctttggaacttgggtcatcagtcatccagtttctgttctcagctcctggagaaagaattttacaaaggatgggaaacttcaaataagtgcaattcattttgggctgacccagtgccctggataatgtgttttgttcggttcgtgcttcagacatttcttgcaggatatcgtagtttggagatttcttcctcccgtaactgattttacatacctaggatcaccactctacggcagttgtgaacatattaagaggaagaaaacaagtggcctattgaattgcagtttcctcatctacatgtgcgtgaccttttttccttgtaagaaggaaaaaaacaaaacggttcttttggagagggccagggttctctaagtatgtcagggatcaaaagtgggaaactgggaaaatgcaacttcaacgtgttttgtcttttaacggaacttatgcttgtaaaacacatcagaagtacagtgtttggttctgcaagtcatttctgttgttgttttttccttgttacgtggaggccggggggactgggggctggaggaggtgttccctccaacatgactgggcgtgtaacacgtttgcatcaacttttcacagtcagacatgtgctttcgaacaaaggagcagtggagacaggcagagatgggggcttgacacagtttacagattttgtgcttcaacagtactttacaaatgacttgctcaattttaacgtccatcaccacaagagacattggagtaaaatgagaaaattggagctacttgaaccaatcttttttggggagtgggggggaggggaaccattaatttgaatacctgcatcataaatcaaatccagtaagcttgtctcctacaaatggacttgaagtatccactttcttcaaagatgaaggctggagacaaagcaatggattgaaatggaaagaaggatgccaagggtctgaaaacatacgggccttttacatcgatttttgtcatgttacagtaacacacttttttttctgagaaaactgtgtacgtcaaattttaaaaattaaacattgaaaggatgtgcaagtctaaaagggctcaacagggttagaatcctgattcgaacatatcaattcactctcaagcatcactttggtctaaaggcgaggaggaaggcaggcagtaaagggagaaaaagagggagatcattgaattactcaataaaagaggctacttaccatcccaacccattgtaagacatacacttctgacataagagaactccttagaggtcgaataaagcgtgtaagcacctttgagtaatgcacctgcccccggagagggggcccggaagcccaacgagggcttagcgaacagacctttgctaatctgtttatttccttgaactggagtcgggctgcgatgggctgcgattcccaggacgatacatttaattagaacaaaacagaaaaaaaaaatgttgtaaaagctcaccaaactgctgcacttgtgtctctgaatgtgggtggcatttcttttaaaaggcaaagtatggtctgtgaaggagaaaggggaaaggggaggtgggagtggggagaaggggtcgtacgtacagcctggcaagggaagccctggctgagaccccccggctaaggaagggtcctcagcggctccccagccagggctgcgacggagtagccatctgtccagagcgttctcttcccctctccacccccattccctccaagactcgctttcctgccggctgaaacccaccgtccgtgtccaaacctactctccagccgcctcttctctcgccccaccaggaaacagtgggcgaaccctgcaccccaactccttctgctcgagcaggggaaggaaacggggccccaacctcgccctgaaacgcgccgggctgaccccattatcacccgccagccagagaagggcgtggggggcccgcgtttcggacttaataaagagaagggggcgcttcctttaacgccctgccaaagcacaaggaaatctccttttctctcccggaagagacggtgccccattttaccccgacagaggggggaaccccaggagaaagcgcgggaccaacttcctctccctacaaggcagggaaaccaaaccttacccccgcaaaacaaggctgagaatcctccctcacgtcacctacctacgaaaagcgagaggacccctgccctttagcaaaaacacggggaagagtcttctctaaaaaaataggctggggttttcatcaaaagggctggagatgcatctcccccctccccaattcggccttctaggggatagctaaaaaacaccccccgccaaaaaatacaagtgctatagagcacccacccaaatgacccccaattacaaggatggagaagggacctgaatgaacccccaccttctgcctcctaagctaaagtacctatcatccaagtaggacagggtgtgcctcccccaggagaaaggatactgccgggggctgggagacccccaaccccaaacccctaagagcggggctgttgttcgagatccccccaaaaagggtccggagcccctcccccatccccttccccgaagccaggcgacgggcaagcgggcccgtagctgccagctccgggcgcaggggcagccaggacccccgtgggtctccgcagcaccccccacggcgccccctccccaggacaggcggacgggcgcggggggtccgaggggcgcctcctcaccttcccctcagcatggcgcccaaaaaagacagagcgagagcgagggagagcgggcgagcgccgcgaggggggggaaacgcatgaggccgggagagaaagcaagcgagaaagagcgagcgagcaagcgatcgagagacacccaccgaccccgcccttcctcctcctcctcctcctcctcctcctccgcggcccggcccaacatggcggccgccccccttcctcctcctcctcttcctccccccggggacgcagccccggcccaaccgggggcctgacctgtcgtcagggagcgggaggcggtggtggaggaggtgcggggtggccgggcgggcgtcgggggaacacggaggaggcgaaggcgttgatggcggcggcggcgatggcggcggcggcgactctgatggcggcggcgggggggtcccgggcgcggcctccatagttcctttgggggggaggggatgttaatgcacgaaaaaggactgcttgggcgtggcgggaggggcacacttaagctcggagggctcctgatgggaatggggtatatattttttcggtttcggaatcacctctgcgctgacctccgcgtaggccgcacggcctaggcctcggagggccgctcgccgcctgctttctccgcagcccacccttgcggtcactcgctcactggcgcggggccctcataggggcgagagccccccccccacgcacccccggggggcgggacacccgggagacacggacactggtgggtggttgggtgtaattagcgcgggccgcgcgcgatggagcaagcgaagggtaaggggagaagaggagagcgagcgaggggggtggggggttaaaaagaaaaaaaggatttgagggagagagggaacgggccgcggagacgggccgactgtctcccttctctgcccgccctgggtgccccggctgcccggcccccgccgcaatcaggaattgacacaaaatggcggctcggcccgaaccagcctagaggctgaggcgggaggaagggtgagatgggagggggaactgagaggcggaggcggaggccgtgtcacgtgcaggagaggggtagagaccgcttgcccgaaggccggcggaaagagccgaaggcaaagggcgaggccgaggggaggcggaaatagccgaaaggagctgagcaggagcgaggaggcgacgggggagagccagaaagagctgaaggtggtgatatgggtggggctagagagagcatgagaaacctaggggagccataaatagcctaagccgatcgggaccggggaaggaggagaaactgagacggtccggaaagagccgaaagcggtgtccgggtgggtggcaggaggtggaaacagccgaaagaaaagcagccagggtaatgcgattaagagaatgagctgaacgggcggggctgaaggggagaataaacgactttcaggaattcgccggagagcaagagggaaaaaccgaaaattgctagtttgaaggaaggcgggaagagccaatagttttaggtgggagaatgggagggaaggaattcaggctacggagagggaaaaaaaaaataaccgaaagctggaggccaggtgccgagagtcggaggtttccggagaagcgatgaagcccagccagcccggaggtgacgtcactcgacaacccagtcgatgatgtcatcattggatgcgagaggggcggggcttggtagtccctcaggggagtttaaggacctggggtgtaggacccatggaaggctctcaaatagcagagctagaaacactggccggtgtcgtagactgtacaaacaaaatcttttgaccctcataaccgtcctaacataagctgctgctattcccatttgcagactgaagttcggtgttttaagtaatcggttcacggtcataggattagttctaaaaagcacagcaagattttttttttaagagacagagtcttgctctgtcgcccagactgcagtgctgtgacacgatcatacctcactgtaacctcgaatccagggatcttccttaaatacttgttagctctttctacagtgccagtccctgtgatggagcatgggaacagtttctgtcttcatggaacttaaccgataatgccccaagggagagaaacagagttaaagaataaagggggtgggtggagtgttagaggagggtcttgtaattgttcttttaggctggtacatgaaaaagaagagatggttccaggcagaagaaataccttatttcaggcggggcgatgttgctcacgcctgtaatcctagcactttgggatgccggggcgggcggatcgcttgagctcgggttggagaccagcctgacgaacatggtaaaaccccttctctactaaaaatacaaaaattagcaggacatgatggctcacacctgtagtcccagctgctcgggatgttgaagagggagaatcgcccgatcccgggaggtcgcgaggctgcagtgagccgagattatgccactgcactccagcctgggcaacagagtgagactcttgtctcaaaaaaaaaagaaaagaaataccttatttcaggccctgacaaagcaaagaccacttagattccaggaagagagaaaaaccgtgtcaacagtgataaatctggagacagaggcaccatgtgacttcctggtatattgatcctacttttttttttttttttttgaggcagagtctcgctctgtcgcccaggctggagtgcagtggcgcggatctcggctcactgcaagctccgcctcccgggttcacgccattctcctgcctcagcctcccaagtagctgggactacaggcgcccgccaccacgcccagctgattttttgtatttttagtagagacggcgtttcaccgcgttagccaggatggtcttgatctcctgacctcgtgatccgcccgcctcggcctctcaaagtgctgggattacgggcgtcagccaccgcgcccagcggatcctactgttttttaaatgttccagctggcagcggggcgtggtggcacacacccataatcccaacactttgggaggccgaggctggcggatcacttgaggtcaggagtttgagatcagcctggccaacgtgacgaaaccccgtctctactaaaaagacaaaaaattagccaggcatggtgtggcgcgcctgtaatcccagctacttgggagactgaggcagaagaatcgcttgaacctagggggtggaggttgcagtgagccaagatggcaccactgcactccagcctggatgacagagcaagactccgtctcaaaaaaaaaaaaaaaaaaaaaaaaaaattagccaagcgtggtggccggcacctgtaatcaccagttactcgggaagctgaggggagaatcgcttgaatccgggaggcagaggttgcagtgagctaagatcatgcactccagcctgagtgacagaaagactttaattaaattaaatgttgcagccggcacagtggctcatgcctataattctagcacaggaggattgcttgagcccagaggttcaagaccagcctgggcaacatcgtgagaccccagtttcttcaaaaagtcaaaacatggccgggcgcagtggctcacgcctgtaatcccagcactttgggaggccgaggcgggcagatcacgaggacaggagatcgagaccatcctggctaacccagtgaaaccccgtctctactaaaaatacaaaaaatgagccgggcatagtggcgggcgcctgtagtcccagctactcgggaggctgaggcaggagaatggtttgaacccgggaggtggagcttgcagatagccccactgcactccagcctgggcaacagagcgagactccgtctcaaaaaaaaaaaaaaagaagtcataacattagcccggcttcatgctatgcacctgtggccccagctacttgggaggctgaggcaggagaatcactggagcccaggaggttgaaggaggttgaagctacagtgagctataatcatgccactgtactccagtggagactttgtctcaaaaaaaataaataaataaaaataaaaataaggccaggcacagtggctcacgcctgtgatcccagcactttgagaactctaggcaggtggatcacgaggtcaggagcagcctggccaacgtggtgaaaccctgtctctactaaaaatacaaaaaaaattagccgggtgtggtggcagttgcttgtagtctcagctactcaggaggctgaggcaggagaatcgcttgaacccaggagacagaggttgcagggagccgagctcacaccactacactagagcctgggtgacacagcgagaagaaaattcctgacaaaatgcttaaaataaatcatcagtggatgaaacttgttttaagaagctggtgctccccccaccatcccacctggtaccccagttgccagccaagaattgtgttacctttaccctgactatcgtctttctggatccaatctcagatctaatggttagataattattctcttctcctataaaatgtccctattagagtgaatcttaattggccaacaagagaccttttttccttgcatgtaagattgtaataaaatgttcactcatgctcatagctatgttgtccaaaaagttttctttaacacaccaagaactaatacttcaggtttgtaggaatggaaaggaaggacaccaaagtagctcactatgttcgattgtggatggtgccattccttcctttacaccttgatttttggacctcatgtattctgggttatggacaaaatcactgattgagaacatagaccacatctaagaggacagccattgtcttttcaaggtatggtcctgaaggggccccatctctgtagtttcaatggggccattctacaattctagatggccatctgcttttaagtaatggggaaaacaaaaatcccaccaagcaggaattccctgtacttcttcagtgtcatgatggaacattgtggaacattgtctgccaagcccttctgacacttcatctgacttttttatttttatttatttatttatttatttttatttttttgagacagagcctcgtactgtcacacgggctggagagcagtggcacaatctcggctcactgcaacctctgcctccagggttcaagtgattctcctgcctcagcctcccaagtagctgggattacaggcgcccaccaccatgcccaactaattttttgtgtttttagtagagacggggtttcaccatgttggccctgcagtctcacactcgtgaccttgtgattcgctcgcctcggcctcccaaagtgctgggattacaggtgtgagccaccgtgccctgcctgtttagttagtttttgagacagagtctcgctgtgtctcccaggctggagtgcagtgtcgtaatcttggctcactgcaacctctgcctcccagattcaagcaattttcctgcctcagccttccgagtagctgggactacacgcgcacgccaccacacctgtctaattttttgtattttagtagagatggggtttcaccgtgttgtccaggctggtcgagaactcctgacctcaggttatatccacctgcctggacctcccaaagtgctgggattacaggtgtgacccaccgtgccctgccaagttttttagtttttgagacagagtctcgctctgtctcccaggctggagtgcagtggtgcaatctcggctcactgcaacctccgcctcccaggttcaagcgattctgctgtctcagcctccggagtagctgggattacaggcatgcacaatgcctagctaatttttttttttttttttgagaccgagtttcactcttgttgcccaggctggacaatctcggctcaccacaacctccgccccccaggttcaagcgattttcctgcctcagcctcctgagtagctgggactacaggtacgtgccaccacgcccagctgatttttgtctttttggtagagacagggtttcaccatgttggccaggatggtcttcatttcttgaccttgtgatccgccagcctcggcctcccaaagtactgggattacaggcgtgagtcactgcgccccgccaatctcggctcactgcaagctccgcctcccgggttcacgccgttctcctgcttcagcctcccgagtagctcggactacaggtgcccatcaccatgcccggctaattttttgtatttttagtagaggcggggtttcactgtattagccaggacagtctcgatctcctgacctcacgatccgcccgcctctgcctcccaaagtgttgggattacaggcgtgagccactgcgcccggccaaattttttgtatttttagtagagatggggtttcaccatgttggccaggctggtcttgaattcccgacctcaagtgacccgccccgcctcggcctcccaaagtgctggaattacaggcgtgagccaccgcgcccagcctatttattttatttattttattactttttttgagacagaatctcactctatcgcccagggtcgagtgcaatggtgcaatatcggctcactgcaacctctgcatcctgggttcaagcgattctcctgcctcagctttcccagtagctagaattacaggcgcctgccaccactcccagctcatttttttttttaattttttttatttttagtagagctgaggtttcaccatgttggccaggctaatttcgaactcctgacctcaggtgatccacccgcctcagcctcccaaagtgctgggattacaggtgtgagccactgcgcccagccggcctatttatttatttattttgagacggagtcttgctttgtcgcccaggctggagtgcagtggtgcaatcttggcccactgccacctctacctccctggttccagcgattatcctgcttcagcctcccatgacttttttttgtttttttaattttatttttttctgagacagagcctcgctctgtcatccaggctggagtgcagtggtacaatcatggctcacttatagccttgacctccctggctcaagtgatcttcctacctcagccccctaagtagctgagaatgcatacgtgggcaaccagacccagctaatttgtgtgtgtatgttgtctggtttttttttgaaacagggtctcaccatgttgcccaggctagtcttgaactactcctgagctcaagtgatcctcccacttgagcctcacagagtcttaggattacaggcgtgagccactgtgcccggcccattgttttgactttagctactttctttttttttttttttcttttgacacagagtcttgctcttgtcgcccaggctagaatgcaatggcacagtcttggctcactgcaacttctgcctcccaggttcaagcgattctgctgcctcagccttcttggtagctaggattacaggcacctgccaccacgtccagctaatttttgtacttttagtagagacagggtttcaccatgttggccaggctggtctcgaactcctgacctcaggtgatcggcccgcctcagcctcccaaagtgctgggattataggcgtgagccactgcacctggcaattttcgctactttctgtcaatttcctgttcctttcccactcccctactttttggatgctcttgtaactatttattttctttttttttttttcccaagactgagtcttgctctgtcgcccaagctgaagcgcagtggcgagatctcggctcactgcaagctctgcctcctgggttcacaccattctcctgcctcagcctcccgagtagctgggactacaggtgcccgccaccacacctggctaattttttgtatttttagtagagacggggtttcaccgtgttagccaggatggtctcgatctcctgacctcgtgatccgcccgcctcagcctcccaaagtgctgggattacaggcgtgagccaccgcacccagccaactatttattttcaagcagagccttgctctgtgccccaggctatcatgcagtggcactatcatagctcactgcaaccttgacctcctgtgctcaaacagtccttctgcctcagtctcctgagtagctgggactacaggtgtgcaccaccatggtaatttttttgtgttgtcgtagggatgaggtctccctatattgcccaggttggtctcaaacacctgacctcaagcaatcctcccacttcaatctcccaaagtgttgggattacaggtgtgagccactgcacccagttaacttactatttagctgttgattagtgtctagactcagtaaagttagataataatttgtgtaagaatctcctttgtaataactggtctggcatcacagacaagcctgaaagaaatttgccagttttgtatccaatttcccaacataattgcaacatccttccagcccccccaccccccagaatatccactgctccttctttcagccatctctatttttctgctgctttcatcattaatgagttcaataacacctttgacatctgctcaccctgtttttgtatgagtcatgtttgtttgttctttgagacagggtctcattctgtcacccaggctggaggacagtggcacaatcatggctcactgcatcatggacctcctaggctcaagcagtcctcctgcctcagcctcatgagtagctgagaccacaggtcgtgccaccacacccagctgtttttgaatttttggtggagatggagtttcaccatattgcccaggcgggtcttgaactcctgaactcaagtgatctgccttcctcagactcgtaaagttctgggattactggcatgagccaccacgcccagcctggggacatttttttttttttttgagacagcgtcttgctctgtcgcccaggctggagtgcagtggtgggatctcggttcactgcaagctccgcctcccgggttcatgccgttctcctgcctcagcctcccgagtagctgggaatacaggcgcccgccaccacacccggctaattttttttttgtatttttagtggagacggggtttcaccgtgttagccaggatggtctcgatctcctctcctcgtgatctgcccgcctcggcctcccaaagtgctgggattacaggcgtgagacactgcgcctggccttttttttttttttttttttgagacagagtctcgccctgttgcccaggctggagtgcagtggtgggatctcggctcactgcaacctccacctcccgggtccaagcgattctcctgcctcagcttcctgagtagctgggattacaggtgcccaccgccacgcctggctaacttttgtaatttaagtagagacggggtttcaccatcttggccaggatggtctcaatttcctgacctcctgatctgcctgcctcggcctcccaaagtgttgggattacaggcatgagccactgtgcctgaccagggacacattttaaaagttaaaaacatgactcttagccaggtgcgatggctcatgcctgtaatcccagctacttgggaggctgaggcaccagaatcacttgaacccaggaagtggaggttgcagtgagccgaaatagtaccactgcactccagcctgagtgacagagcaagactctgtctcaaaaaaacagaaaatgtatacgtgtgtgtgtgtgtgtatatatatacacacacacacacacacacacacacatatccctgttttatttcatttttattatggggtttttgttgttttctgtttttgtttttgtttttgtttttgttttgagacagtcttgctctgtggcccaggctggatcggctcactgcaacctccacatcccacttccaagtgattctcctacctcaacctcctgagtaactgggactataggtgcccactgccacacctggctaatttttgtatttctagtagacagggtttcaacatgttggccaggctggtctggaactcctgacctcaggtaatccgcccacctcagcctcgggctattttttattgaagaataacatacgtacagaaaaagcatataatcacaggtacgcagcttgacacatttacgcaaagtgaatattctatgtaaccagcagctaaatcaagaaacagaaaattataagcagagcagagtccccgtcctgttcccatgtagtcactggtccttctaaagcaatcaccattctaacttctagctacatacataaatattctcttaatttgtcttaattttctcataaaaatggaatccataatatgtactcttttgtgtctggcttctttcattccacattatgtttgtggcatgtagttatatttcattcattctcatttctctatagtattccacagtgtgactaaactaggtattacatgattatgtggaatgattggaatgctctgacaccgctgcaactttaaataaccactttgcgctgtgtacagtggctcatgcttgtaaccccagcattttgggaggccgaggcagaaagattgcttgagcctagaggtttgagaccagtagggcaacatagtgagtccctgtctctacaaagaataaaaaaattaacaaaccatggtggctcacgtcagcagtcccagctacttgggaggttgagggaggaggatcacttgagtccaggaggtggaggttgcagtgagctggaaaacaaaacaaaacaaaacaaaacaaaaaacagaaaagaaaagaaatagcccctaagtggccagatgcggaatcccagcgctttgggaggccaaggagggcggatcatttgaggtcaggagttcgagaccagcttgacctacatgtcagaccctgtctctactaaaatacaaaaattagctggacgtggtggtgggcacctataatcccagctcctcgggaggctgaggcaggagaatcgcttgaatccaggaggcggaggttgcagtcagccaagattgtgccactgcactctagcctgggtgacacagccagattccttatcaaaaacaaacaaacaaacaaaaaatgcccctaactgggaactgcttaaatgtccataataaaagaagacaggggccaggcacggtggctggtggctcatgcctgtaatcccagtactttgggattcctaggtgggcagatcacttgaggtcaggagttcgagaccagcctgaccaacatggtgaatatccatttctactaaaaatacaaaaaatttagctgggcgtcatggggcatgcctgtaatcccagctactcgggaggctgaggcgtgagaatcgcttgaacctgggaggtggagattgcagtgagctgaaattgtgccactgcactccagcctgggagacagagtgagactctgccttaaaaaaaaaaaaaaaaaagaacagtgtattgtactgcacgcacatattttgtgcatctgctgggttataagacctaaatggtagagtcatttgcaccacatcctggacaggctagagaatctcctcttgctctgggctccaccggccttacagttcacttcgctgatgagtgagagcaggtctcccggccatgatacaagctgcccccaaaattccaaagggctttttcttaccaccttttccatcaaaggatgggggtataggggatgaaagtttcagtagcttgccctgtgtttagggaaaaaacaaaattctaacaaaactcttctcccggacctccaaaatatctctgggctggcaggtctctgtattttttttttttttattgaacttccttaaatgcacataagtcagctaatacttccatggtacctgtttctttctgctcttggtacatcgatattattattattataattatttaattattatgaaacaaggtcttgctctgtcgcccaggctggagtacagtggcacaatcacagatcactgcagcctccacctccttggctcaagtgatcctccagccttagcctcctaagtagctgagaccacaggtgcacaccaccatgcctgataattttttttttttttttttttggagacggagttgccctctgttgcccaggctggagtgcagtggtgtgatctcagctcactgcaagctccgcgttccgggttcacaccattctcctgcctcagcctcctgagtagctgggattacaggcacccgccaccactcccggccaattttctttcttttttttttttttttgtattttagtagagacggggtttcaccatgttagccaggatggtctcgatctcctgacctcatgatccacctgcctcagcctcccaaagtgctgggattacaggtgtgagccaccgcgcctggcccaatacccggctaattttgtgtgtgtgtgtgacgcagtctcgctctgtcgcccaggctggagtgcagtggcgctatctctgcttgctgcaagctctgccttctggcttcatgccattctcctgcctcagcctcccgagtagctgggactacaggcacccgccaccacgcccggctaatttttttttttgtaattttagtagagacggggtttcaccgtgttagccacgatggtctcaatctcctgaccttgtgatccgcctgcctcggcttcccaaagtgctgggattacaggcctgagccaccgcgcccggccaattttgtatttttagtagagatggggtttcaccatattgtccaggctggtctcaaactcctgacctcgtgatccgcctgcctcggactcccaaagtgctgggattacaggcatgagccaccacgcccagccagaattttttcttttttctagagaagggggtctccgtatgttgcccagtctggtcttgaccacctgaccttcattgattttcctacgtcggcctcccaaagtggtgggattacaggtgtgagccactgccaccggccagtaattatgctgatgaaagacctgttttttctccagttcctgggatggctctagggagggttatttacactgtgagtgaggaggcattcacagagaagttcctccagagtgtggaagaagcactaccatttggcaccaacgcctggagaacaaaggaggagaccattggccaaagagaggcatttccattttgttggaacctgctgaccaccaacccatagcattttttccctttcttccttgctaatccaatcgcagattcattgaggaggtgagaggtcctgagatccaggctggaagaggagtgattggtctacctggttctcaagggataatgttgccccctagaggacattttggaaattattaaggaaaattaacgactggttttttggttgtcatctggttctcaagggaacagtattgcttccttgggagaatttggaaacttaccttttttcatcgtcacaatggtgaagggtttgttactgggattagaggacaaggaccagacatgccaagatgttctacaatatagcattcctaattaataatcacctaatgaataaagctcagatagcacttaaaaagtggggaaaggactgtttatactaaattatgctaagctgtaacactgaactattccagttcttttgaaattgtttacatagcaaaatcatagttgactcctggccatttaagacttatgccaccactcttgggatagtgaaaatgttttgcaactagattgaggtggtgattgtataatatggtgaaagtactaaaagccactaaattgtgcacttcaaaatgctgcctaattttatattatgtgaatttcacctcaataaaaatgtctttttttttttttttttgagagggagtcttgacctgttgccaggctggagtgcagtggcgcaatctcagctcactgcaacctccacctctcaggttcaacccattctcctgcctcagcctcgcaagtagctgggactacaggtatgcgccaccacacccagctaatttttttgtatttttagtagagacagggtttcaccatgttgaccagcatggtctcaatctcctgaccttgtgatccacctgcctcggcctcccaaagtgctgggattataggtgtgagcccccgggcccagccaataaaaatgtttttttaaaaggatgcatatttccaaacatgagactataccatcacatttaatttttcccagaaactataaaaagtagaagtgaagagaggaaagggagacacttttagaccttcaatgagtctgcaagtacaggagaaaataatttatgcagcaattagctttattttcagggctctttttcttttcttttttttttgttgagacggagtctcgctcttttgcccaggccggagtgcagtggcgctatcttggctcagtgcaagctctgcctcctgggttcataccattttcctgcctcagcctcccgagtagctgggactacaggcacccgccaccatgcccagctaattttttgtatttttagtagacacggggtttcaccgtgttagccaggatggtctcgatctcctgacctcatgatccgcccgcctctgcctcccaaagtgctgggattacacgcgtgagccaccgcgcctggccaacaaagtgatcattttacaagagttatggcatagtcacaggtaagaacctgggtcactgggtcactccctaaccaattacgaattactatatgccatggaccttcaggattactttcttttttgttttgtttttgtttttttttttgagacagagtctcgctctgtcacccagaccggggtgcagtggcgcgatctcagctcactgcaacctctgcctcccggattcaagcaattctcctgcctcagcctcccgagtagctgggattacaggcatgtgccaccacgcctggctaatttttttgtatttttagtagagaccgggtttcaccatattggccaggctggtctcgaactcctgaccttgtgatccacccaccttgacctcccaaagtcctgggattacaggcgtgagccaccgcgcccagcccaggattactttctttctttcttttgagacagagttttgctcttgttgcccaggctggagtgcaatggcacaatctcggatcactgcaacctccacctctcaggttcaagcgattctcctgcctcagcctcccaagtagctgggattacaggcatgcggcaccatgcctaaaattttgtatttttagtagagatggggtttctccactttggtcaggatggtctcgaactcccgacctcaggtgatccgcccgcctcggcctcccaaagtgctggtattacaggcatgagccaccgtgcctggcctctatttttctttctataatccatgtacattttcctttaataatataaggcaactaaacagcactttattttcagaggcttatctaaaagatacttgacacagccctttgcagctgggtcattctctgaattctaaatgtcgtttcctgcacaaagtggttatttgatcttgtaactggcattttccccggagattaggaagtggcacaccaaagtgcaaaaaactttggaatcagaactttaatttttaatctttattttatttatttatttatttttgtgacagagtctcgctctgttgcccaggctagagtgcaatggcaagatctccactcactacaaactccacctcccgggttcaagtgattctccgccttcagcctcctgggtagctgggatcacaggcgcacaccaccacactcggctaatttttgtattttgagtagagatggggtttcaccatgttggccaggctggtctctaactcctgacctcaggtgatcctcccgtccatgcctcccaaagtgctgggattacaggtatgagtcactgtgcccggcctaatttttatatttttttgtagagacggggtctggctgtgtttgacagcctcaaactcctggcctcaagtgatcctctcaaagtgttgggattacagacatgagccacagtgcctggcctattgaaagcttttccatcataataggtccttccccccaatgcttgcagcaagtcaatagtaggagaccccaggttgcagcagagaaagaggtttaatcataggggccactgaaaaccaagagaggagatggaaggaaccacgaatccacttccccagggagttcggggctttttaagggttttggagtgggttgaagtgtggaggtcattggttggttgaagtgtgcagggtgaagtaatgaaacagggagttgaagaaactctattctcctgtcgatttggttcctctgcggggtcttcacactggttggtatcagctgttttgctggaattcaggatctgaaaaatatcttaagcttttttttttttttttttttttttgagacaaggtctgttgtccaggctggagtgcagtggtgccatcatagctcattgcagcctctaacgcctgggctcaaaggatccttccaccttagcctcccaagtagctgggattacaggcacgcaccaccacacccagctaattaaaaaatttttttttttgtagagacaggggtcttgtcatgttgcccaggctggtcatgaactcctgacttcaagtgattttcctatctcagtctcctaaagcgcatggattacaggcatgagccaccatgccgggcgctaagcaattcttattatttatttatttatttatttatttatttttttctgagacggagtcttgctctgttgcccaggctggagtgcagtggcgcgaactcggctcactgcaagctccatctcccaggttcatgctattctcttgcctcagcctcctcagtagctgggactacatgcgcctgccaccacgcccggctaattttttgtagttttagtagagacaaggtttcaccatgttagccaggctgatctcgaactcctgacctcgtgatccgcccacctctgcctcccaaaatgctgggattacaggcgtgagccaccacctccggcctaagcaattcttaaataaaaatctatgattccgccaggcatggtggctcacacctgtaatccgtgcactttgggaggccgaggcgggtggatcacaagttcaggagttcgagaccagcctggccaacatggtgcaatccctgtctctactaaaaatacaaaagttaggtgggcatggtggcttttttttttttttttttagacgggagtctctgtcatccatgctggagtgcagtggcaggatcttggctcactgcaacctctgcctcccaggttcaagcgattctccggcctcagcctcccaattggctgagactacaggcgtgtgccaccacgcccggctaattttttagtattagtagagatgggggtttcaccatcttggccgggctggtctcgaactcctgacttcgtgatctgccctccctggcgtcccaaagtgctgggattacaggcatgagccactgtgccctgccaaaaagcctatgattctaacatcagaaatccttccacctcagcctcccacgtagctgggactatagactcagtaccaccacaccaagctaatttttgtatttttaatagagatagcgtttccctatattgaccacctggggccatccctggttttttttttttttcccttccttccttcctttccctctctctttccctccctccttccttcctttctttctttctttcttttttttttttttttacagagtcttgctctgttacccaggttggagtgcagaggcatgatcttggcttactacaacctccgcctcccggattcaagcaattatcctacctcagccttccaagtagctgggactacaagtgtgagccaccatgccctgctaatttttttatttttactaaagacgggatttcaccacattagccaggctggtctccaactcctgatttaaagtaatctgcctgccttggccttccgaagtgctgagattacaggtgcgagtcaccgtgcctggcctattcctgttttcttaacgctcctctctcccactgggccgtgactgcctctaaggcagagatgtgttcatttttattattattgtatgtccagggctgggcacaaagtgcaacacatagtagggacatgaaaggctgggcacagtggctcatggttgtaatcccagcactttgggaggcagaggcgggaggatggcttgaggccaggagttggagaccagcctaggcaacagagggaccccatctctatgaaaaaaaaaaaaaaaaattgacagttcaatgtcacctctgataagccttccctgaccacccctgttactctgtagccccatgtcctgctttatttttctccaaagcatttatcatcgctgggtttatatttatttctcttcgggcttttctcactggatcgtaaactccatgaggacagggctttgtcgatttcactcaataccgttattttacaacatccctattgctgggatctcagtatgcactccttaaatatttgcagaatttaagtgccacataagtgaccacgtgggcaacgccctcggggccttaagccgcgccatttttggggctaggattggttggaccctccgtcacgtgacatgcagtcgccggatcgcctttgagtctcgtgaggtacttttggtcccaggctccgcggacgaggtactgcgcaggcgtgggagggtctgcgcatgcgcagaagcactccgggcgtgctgccggcggcggtaggtggcgcgcgggtccggcgggcggttggcttgagcgggaccggagctgaggcaggaagagccggcgccatggtggagaaggaggaggctggcggcggcattagcgaggaggaggcggcacagtatgaccggcagatccgcctgtggggactggaggcccagaaacggtcagggccggcgcggcttgaggccgctagggtctggagggggcgtctattctgaggcgtttgcggcccggaaggagcgggaaggtgtgatttgaagggaggaggcgggaattctgtgctctgggatcgtctctctcttggggggactggaggagttgattggggatgtttctggaaggtctgggaagtggttgggagggccgttccgaaggatgggagctctgaagggggcgttggggagtcctgagagagcgggagaattcaaactcaggaaatccgaggcccgaaagcggtgattgtggggtttgatcgcggttaggggataagaggggctggggatacgtggaaagggtgaggtgagggacgcagttcattcattcgagggtatgggacctggttccgtgctgcacacaggggagactggactggccaaccggacagacgggagcttacactcttgtgggagctcacgggcgggccagtctgagagaatgcgggttttgaggagttttggagcaagttatctcaaatgggaatcttgagaggctcggagaggctggagggggacggccgtaggctcccgaaaaggttgcttgtgtttggtatggggctgtgtcttgataggacaggagacgtagtttgggcattgtggagtagcttagggaattctttttttttttttttttttttttgagatagtctctctctgtcgcccaggctggagggcagtggcgcgatctcggctcactgcaacctctgcctcccggattcaagcgattctcctaactcagcctcccgagtagctgggattataggggcccgccagcacgcccggctaatttttgtatttttagtagacacggggtttcgccatattgacgagactggtctcgatctccttacctcaagtgatccacccgcctcggcctcctgaagtgctgggattacaggagtgagccaccgcgccaggacgtcttttgttttgtgcagttgggtgacctcggttcactgcagcctctggcctcccgggttcaagacttcctctcacctcagtcttctgagtagctgggattacaggctcgcgccaccatgcctggctaatttttgtatttttagtagacatgggttttcaccatgttggccaggctggtctcaaactccggacctcaagtgatctgcccgccacagcctcccaaagtggttggattacagacgtgagccactgtgcccagcttgttttttttttttttctttctctgtggcccagtggagtgcagtggtgggatcacagctcactgtagcctcaacctccaaggctcaagggatattccctcttcagcctcccaagtagctgggactacaggcgtgccccaccacatcatccgactaatttttgtttttttttttttttgtaggatggggttttgccatgttgcccagactggtcttgaactcccaagctcaagcgatcctcggcctcaagagatctccccccatctcagactcctaaaatgctgggattacaggcatgagctaccatgcctggcctcattgatcaatatttttacttagcctggacgcagtgactcacacctgtaatcccagcactttgggaagctgagttggggggaggggacctcttgagcccaggagtttgagactagcctgggtaatgttgccaaacccagtctctacaaaaaaatacaaaaattagccaggcatggtgacataagtttatagtcccagcttgtcaggagactgaggtgggagcatcacctgagcccctgggaggtggaggttgcagtgagccatgatcacaccactacaccccagcctgggtgacagagtgaggccccgtctcaaaaaaaaaaaaaaaatccacaagcgtgtgtatatgtgtcagttattaaaggatggtgaagtgagagggttgttttgataggttggccagggaagggctctgaagaggtaacattgagcctcagacttatatgggaaagagccctgtggtcatctgggagaactttcctagctaagagaacagcaagtgcaaattcccagaggcccaggcatgattgtcaaattagagaaataaggtggcaggaaccaaatgatttgaggagtagcttttattctaagtgtgtgggaaaacctgttggagtgttttgagtgtgggagtaacatgatctgttttttgtttgttttttgagacggagtcttgctctgtggcccaggctggagtgcaatggcacgatctcggctcactgccattgcagtgaatccgcctcccaggttcaagcgattctcctgcctcaccttcctgagtagctgggactatcggcatgtgccacaacacccggctaatcttgagtatttttagtagagacggggtttcaccatgttagacaggatagtctcgatctcctgacctcgtgatccgcctgccttgggctcccaaagtgctgtgattacaggcgtgagccactgcggcctggcctggtttgtgttttaaaatgatcgctccagaataggttaaagtggtcagaaatggaagtaaagattctggctggactgttgcagtaatccagttgagataaaaatattggtggcttgaaactcaagagaaggggtcaaataaatatattctggatatattttgaaggtagaagagggaacagaatttggggcagaagtccaggatgacaccactgtttttggcttgagcacctacctggaacgatggaattgccattttgaaagatatggagagctgtaggtttggtggggtcggggaagagtcagttctcttttaggtttcagatttgttttttttgtttgttttttttttttttgagacggagtctcactctgtcgcccaggctggagtgcagtggcatggtctcggctcactgcaacctctgcctcccaggttcaagcaattctcctgcctcagcctcccgagtagctgggattacaggcgcccgccaccatgcccagctaatttttgtatttttagtagagacggagtttcaccgtgttggtcaggctggtgttgaacccctgacctcgtgatccacctgcctcggcctcccaaagtgctgggattacaggtgtgagccaccatgcccggcctcagatttgtttttttatacaactaagtagaaatatgtgaggggttgagttcagaggtaaaatttgggtgatggtgggtattgtgtgagtacagagtatagaattaatggaggggttggggaggcagacacgtcaggagaatttagtttgagggggtgggagctttcagaaggttttagagggtgcagtggtgggatgggaattacctcaggctcatttcagatctgtggggtcttctttgatggggtggggggatgtcatcatgaggcattaacattggtgggagggttgaaggcacctggaatagattgggaattaagtgatgagaatgtgcctctggacataggtggactgcattgattttagggactgctattttctggatggagtggaaagaggatttatgtgagttggaggaaactttgaggaagcttggtgtgttctgagatcctaaagggttggggaggggattctaaggtactggaagggttaatcgaaggggtttgcggcagcagatagctttgtttgaagtggggcaaagttggtgaggtttaaactggaatgtagttagggaactttcagagggatggggatgatttttctgagaagcagtgaagaatggatgggggcctctgagtgggagatgacctaagggacaagtcagggtcagggcatggaatttgtgggaggtaggaattattctgagggagtggagctgtaccaaatttggtggagaacatgaaaaggattggctgggggttgcaggagggagggaagaggttgtttgtaatttgtactctatttttagacagtcttagagagtttattaaagtgttttttgtccattttcagccgaggtttttagaaattaaaaatttttttgtgtgagtacatagtaggtgtatacattttgggggtatgtgagatactttgatacaggcatacaatgggtaataatcacatcagggtaaatggggtatccaccaccttaagcacttatcctttgtgttacaaacaatccaattatattcttttagttgctttgaaatgtacaacaaattattgttgactgtagtcaccctgttatgctatcaaatactgtatcttattcattgtatttaattatatttttgtatccattagtcatccctccttcccctccaccccccactacccttcctagcctctggtaaccctcagtctactatctgcatgagttcaattgttttaatttttttagttcccacaaataagtgacagcgtgcaaagttttctttctgtgcctgatttatttcacttaacataataacatccagtgccctccctgttgttgtaaatgacaggatctcattcccttttttttgtagacagggtctctctgtcgcgcagactagagtgcagtggtgtgatcacaactcacttcagccttgacttcttgggctcaggtgatcctcccacctcagcctcccggtagttgtgactatagcacgtgtcacaagcccagctaatattttagtacaggtggggtttcaccaggctagtctccaactcctgggctcaaataatcctcctgcctccctgcaaagtgctgggattagaggcgtgaacagcaatgcccagcctttgtaccacaatttctatttttttttttgaaacggagtctcgccgtgtcgcctaggctggagtaggctggagtgcagtggcgcagtcttggttcactgcaagctccgcctcccaggttcacgccattctcctgcctcagcctccctagtagctgggactacaggtgcccgccaccacgcccggctaatttctgtatttttagtagagacggggtttcaccttgttggccaggatggtctcaatctcctgacctcgtgtaccacaatttctttatccatttgtctgttgatagacatatgggttgctttcaaatcttggctattgtgaagagtgctgcaataaacatgggatttattgcagttttttttcttttgagaccgagcctcgctctgttgcccaggctagaggacagtggcacgatctcagcccagtacaatctccacctcccaggttcaagcgattctcctgcctaagcctcccaagtagctgagattacaggcacctgccaccacgcccggctaatctttgtattttttagtagagatggggttgctgtgttggccaggctggtctcaaactcctggcttcaggtgattggccctccttggccccccaaagtgttgcaattacaggcgtgagccaccacacccagcctgatttattttcatttgggtatatacctagcagtgggattgcatttttacccgagtcttttttttttttttttttgagacggagtttcgctcttgttacccagactggagtatggtggcgtgatctcagctcaccgcaacccttgcctcccaggttcaagcaattcttctggttcagcctcccaagtagctgggattacaggcgtgtgccaccatgcccggctaattttgtattttagtagagacgggattcctccatgttggtcaggctgtgaactcctgacctcaggtgatccgcccgccttggcctcccaaagtgctgggattacaggcatgagccacagcccccggccttcacctgagtcttatagcagctctctggagtcggaagggcagtgatttccttctctgttcagatgaggaaggaggctccacagagcaaattgacttgcctctaagagggctctaggtgggataggagggttctaggtgggataggagaactctggagactggagttcctttatgaaacagaagccctggaaatgggcaggctgataaaatgtacaaattgtggggcattttataagacagttatcctacttctcttccaaaagtcagtttcatgggaaaaataagtgaagggactgttgtggattaaaagagagtaaaggccgtcacagtgactcagcctgtaatcccaggactttgagaggccgaggtgggtggatcacctgaggtcaggagttcgagactagcctggccaacatggtgaccgtctctactaaaaatacaaaaaaaattagccaggtgtggtggtgggtgcttgtaatcccaactacttgggaggctgaggcaggagaattgtttgaatccaggaggcagaggttttagtgagccaaggtcacactatcgcactccagcctgggtgacaagagcgaaactctgtctcaaaaataaataaataaaataaaataaagtaaagaagcagcttcctagagcagatttggttgcttaaattgaggccaagtttctggagtttttattgatagttgacaattacaactaaaatttttttttctcgctctgttacccaggctggagtgcagtgacgcagtgacgtgatcttcagctcactgcaacctccacctcccgggttcaagggattctcccgcctcagcccccaagtagctgggaccacaggcgtatgccatatcactcagctaattttgtgtgtgcatggcgtatgccgtaacactcagctgattgtgtgtgtgtgtgtgtgtgtgtgttgttttttttttttttttgtgatggactctcactctgtcgcccaggctggagtgcagtggcacaatcttggctcactgcaacctccgcctcctgagttcaagcgattctcctgccttagcctctggagtagctcggattacaggcgcgtgccaccacacctggctgatttttatatttttagtagagacggggttttaccatgttggccaggctggtctcaaactcctcacttcaagtgatctgcccacctcggcctcccaaagtgctgggattacaggcgtgagccactacacccggcctatgtgtgtgtattttatttttttatttttttgagacggaatttctctcttgttgcccaggctggagtgcaatggcgtgatctagactcactgcaacctctgcctcccgggttcaggcaattctcctgcctcagcctcctaagtagctgggattacaggcgcctgctaccgcgcccagctaatgtttgtatttttagtagagaccaggtttcgccatgttggccagggtggtcttgaactcctgacctcaggtgatctacccgcctcagcctccttaagtgctgggattacaggcatgagccactgcgcctggccagaagttaccttctttgtgcctgttttctcagctgcaaaagaggggtaacaaagtgccagcccattagattgtcatgggaattaaatgacataatacatacaaagagcttagtagaacagtgcttggcacatagtaagtgttagataaatgttggccattattattttattatgtaccagatttctataattctgctgatggacacaggtttgttttggtgtgtctattaattcacagccatttgagtaacagtatgtcctaaatgccaaggaagttactggttctagtgatacagtggtttctggagtttacattctaatggaggagggggcagtaaacatataaacaagtagtgtagcttagcacagtggtgtgtggctgtgatcccagctactggggaggctgaggttggaggatcacttgagccaggcaattgagactagcttgggcaacttagtgaggccccatttcaatcaaaacagtgggcaacacagaccccatcttaatcaaaacaaaaacaagtagcataattcgagatagaagaggatgtggacctattttaaattaggtggccagtatggacttctctaaggaggtgacaattgagctgagacctaaagaatgtgtcccttaagaagttgagggaagaagcaatgggaagcactaatgccaaggtcctaaggtgggagcaaggatgggagcaaggatgatgttctctaggatcagcctcccgagtagctgggactacaggcacgtgccaccacgcctggctaatttttgtattttgagtagagatggagtttcaccatattggccaggctggtctcgaactcctgacctcaagtgatccgaccgcctcggctaattttgtgtatttttagtagagacggggtttcaccgtgttagccacgatggtctccatctcctgaactcatggtcctcccaccttggcctcccaaagtgctgggattacaggcgtgagtcgccgcgcctggcacacccagctaatttttttttgttttgtacagatggagtcttactttgttgcccaggctggtttcgaactcatgggctcaagtgatcctcatgccttgccctcctaaagtgctgggattacaggtgtgacccactgcgtccagcctgctgtagttttgtcggagagaaacgatggtggctcagactagagtggtgtttgtggaacttgagggaagtagatggacaatgctgctgtgaatgtgtatctttttttttttttttttttgagacagagtctcactcttgtcacccaggctggagtgcagtggcgcgatctcggctcactgcaagctacaccttccgggttcacaccattctcctgtctcagcctcccgagtagctgggactacaggcacccgccaccactcccggccaatttttttttttttttttttgtatttttagtagaaacggggttttaccatgttagccaggatgatctcaatctcctgacctcgtgatctgcccgccttggcctcccaaagtgttgggattataggcgtgaggcaccgtgccctgctgaatgtgtatcatttttgtgcccacttgggtatttctttttttttttttttttttgagacggagtctcgctctttcgtccaggctgaagtgcaatggtgcggtctcggctcactgcaacctccgcctcccgggttcaagcgattctcctgcctcagcttcccgagtagctgagattacaggcgcctgccaccactcccggctaattttttttttttttctttttgaaacagacccttgttctgttgcccaggatggaatgcagtggcgccatctcggctcactgcaaactccacctcccgggttcacgccattctcttgccttagcctcccgagtagctgggactacaggcgcccgccaccatgcccagctaattttttatatttttagtagagatagggtttcaccttgttagccaggatggtctcggtcttctgacctcgtgatctgcctgtctcggcctcccaaagtgctgggattacaggtgtgagccaccgtgcccagcccacgcccggctaatttttgtaattttagtagagatggggtttcaccatgttggccaggctggtctcgaactcctgacttcaggtgatctacccaccttggcctcccaaagtgatgggatttgtaaacccagcactttgagggaggcagaggcaggaagattgcttgagcccaggagctggagatgagcctgggcaacatagtgagaccctgtgtctacaaaaaaaaaaaaaaacccataaatcagccaggtgcagtggtgtgcacctatagtcccaggactcaataggccgaggtggcgggatcacttgaacctgggaggttgaggctgcagcgagccctgatcttgccactgcccttcaatctgggttcacagaatgagaccctgtttcaataaaacaaaacgtaaacatggtatttggtgttgatggcagttgagtatttaatttaatttaatttaattttttttgagacggagtctgtcacctgggatggagtgcagcggcacagtcttggctcattgaaacctctgcctctcaggttcaagcgattctcctgcctcagcctcccaaatagctaggattacaggtgcccgccaccaacatgcccagctaattttttttttttaaacagagtctcgctgtgtcacccagactggcatgatctccgcttactgcaacctccgcctcccaggtttgagtgattctcctgcctcactgtcccgagtaactgggactacaggcgcctgccaccacgcctggctaatttttgtattttctgtagagacacggttttgccatgttagccaggctggtctcgaacccctggactcaagtgatctgcccgccttggcctcccaaagtgctgggattacaggcgtgagcccccacgcctggccataattttttttgtatttttagtagagagggtgtttcaccatgttggacaggctggtctcgaactcctgacctcaggtgatccacccatctcagcctcccaaagtgctgggattacaggcatgagtcaccgggcccggctgaataatgaattttaaacaactgcagagcagtctgtagagctatgtaggaatgtaggtcgtggagagcagatttattgtcagggactttttatatgtagctgttgctggaagagttcggggagggggagtgcttgctggtattgactcagccatgataaaaaagcctttttttgaggaaatggcattggagttgggttttgaaggggaaaggcgtaggtaggcattgagaggaagaaatggtgcattttgcgagggtggaatgttgtgattaaattttatttaatttttaattaaattaatagcaaactcttaccagcagaacttaaattgtgtgaaaattattcttagttattactaaatccttttcagtatgaataatacatttgctgcagaattattaatgagtttggttacatgatgcagcccaagatcttgatgagttgtttcataatacatgatgtaaagtctgtatttcctttttgaaatctgaaaaaattgtgactctgaaatacttctggttcaagagatttcagataagatatagttgacctattctgcttcctactgacctcagagaagtcttgggatggcctgacctctgattgccttttttcagcctcatcttctgtcactttacagatttaaaaagctaaaaacaaggctgggcacggtggctcatgcctgtaatcccagcactttgggaggctgaggcaggtggatcacttgaggtcaggggttcgagaccagcctgaacaacatggtgaaactccgtctgtaccaaaaatacaaaaactagccaggcgtgacagtaggcgcctgtaatcccagctactcgggaggctgaggcaggagaattgcttggacctgggaggcggaggttgtagtgagctgagatcacgccactgcactccagcctgggcaacagagcgagactctgtctttaaaaaaaaaaaaaaaaaggtaaaagcaattcctgtgtacatgctcttttcatgccaccatgtgttttgcttgtgtgttatacttaactagtgcctcttctcagcacctcttctgctgtcatgctagtttgagccaccatcatcctccctcaccttaactgtgacatcttcctacccccatggctttccatcatgcctcgaagaaaatccagaatccttccattgcatgtaagagccttcatgatgtggccccttgttccaacttttcagcctctctgtcattcctgtccctagaacatgccaagcactcctgcttcagggcttttgcatttgctgttttctctatctggaatgttctgctgccaaatatctgtgtgtttgtcctttatttcattttgatttttgctcatatggcatctcctcagaaaggcttgtatgatttctgtctcaaatagcgttctccatcattcttgattcttgtcacacttgattttcatcactttttcacatattatgtatctatttgtttatctgtctcctactttttcatgagggcagggactatgtctgattcaccgccttatttccacaccatagaaggatgcctggcatagttggtactcaataaatatttgttgaatgaattgttttgtgcagtatggattagagcctgtctctttcctagattcgaggtgtgatgcctcaatgcagttagaaccaaaatgatttttttttttttgagacggagtctcactcttgttgcccaagttgaagtgcagtggcatgatctcggctcactgcaacctccgcctcatggtttcaagtgattctcctgcctcagcctcccaagtagctgagattacaggcgcctgccactacgcccagctagtttttgtattttagtagagacggggtttcaccgtgttggtcaggctggtctcgaactcctgacctcaagtgatccgcctatctcagcctcctaaagtgctgggattacaggcatgagccaccgtgcctggcaaaccaaaatgatttgtgtattttttgttcttctgtgattctgcaagctcactgttctgtatcatcaggttaacaatgtttgtcttacaggctgcgggcctctcgggtgcttcttgtcggcttgaaaggacttggggctgaaattgccaagaatctcatcttggcaggagtgaaaggactgaccatgctggatcacgaacaggtgcgctgttgtgagctcattcctcccctgctctggctcccctttccagcatgaagatctgcagattttgtgagttcctccttgtgccttaagggctgtgaaaggagggctaacattaataaaccattgcctctggagactgaaggtgctattgttgggtttgaattctagctccaccacatctagctggatgagcagtagagactcacaccccctcattgagcttgcctgcctgtaaaatggggttagtaatatctcccttggtggttgcttgtgaggaggtgtagagaagtgtttttccaatttgtgcctaaaaatgacctgagtgactaactgaaaatgcagagtggcctggaggcttcgtggtgccctagctttcacccctagtgattctcatttaggtctgaggcgagctcaggagtatgtgcatttaaaaggtgttttagggctggacgcagtggctcatgcctgtaatcccaacactttggaaggctgaggcaggcggatcatctgaggtcaggagtttgagactagcctggccaacatggcaaaactctgtctgtactcagtatacaaaaattagccaggcatgttggtgtgcacctgtaatcccagctactcgggaggctgaggcacaagaatcgcttgaatctgggaggtggagtttgcagtgagctgagatggcaccactgcactccagcctgggcaacagagtgagactttgccttaaaaagaaataaattaatgaaaggtgtttcaggagattatgatttagatggtccacagacatcactttaaaaaacactggatcaggccaggcacagtggctcatgcctgtaatcccagcactttgggaggctgaggcgggcagatcatgaggtcaggagatcgagaccatcctggctagcacggtgaaaccccatcactactaaagacacaaaaaattagcagggcttggtggcgggcgcctgtggtcccagctactcgggaggctgaggcaagagaatggcgtgaacctgggaggcggagcttgcaacgagccgagatcatgccactgcactccagccttggcaacagagtgagactccgtttcaacaacaacaacaacaaaaacaaacaaaaacaaacaacactggatcagagagaatgtgggcagactgctttgtatagtgcttgaacctaacaagtatccagtaattaggaataatgatctgacatgctgtttgtttgtttgtgtgtttttgcgagacgagtcttgctgtgatgcccagactggagtgcaatggcgcaatctccgcacactgcaacctccgcttcccgggctcaagtgattctcctgcctcagcctctgaagtagctgggattacaggcacgcaccaccacgcctggctaagttttgttttgttttttttttgagacggagtttagctcttgttgcccaggctggagtgcaatggcgtgatcttggctcactgcaacctctgcctcccaggttcaagcaattctcctgcctcaatctcccgagtagctgggattacaggcatgcaacaccatgcctggctaatttaacgtttttagtagagaccgggtttctccatgttggtcaagctggtcttgaactccgacctcaggtgatcctcccacctcggcctcccaaagtgctgggattgcaggcgtgagccaccgcacccggccatgcctggctaagttttgttatttttagtagagatggggtttcaccatattggccaggttggtctcgaactcctgacctcaggtgatccgctggcctcggcctcccaaagtgcggtgattacaggtgtgagctaccatcccctgctgacataatgctgtttgattaatattataatggtagagcccaactccaatgtagctttctctgaccaggctcatcttcaaggtgaaaataagtgctgctctctctacattcccatgcctcagtgacattttatttattttatttatttattttgagacaaagacttactctgtcgcccaggctggagtacagtgacacaacctcagctcactgcaacctctgcctcccgggttcaagcacttctcctgcctcagcttccctagtagctgggattacataattacttcatctggttgtaagaatccaacattggaggccaatcacagaacagtgcgattctgacaccacaggtgtgaggccactgcacccatcttagagcgtattatgtagtttacattcaacaagcatctgagagcacctactgggtgccctgaagtctgctaggtgctggtgatagaaagatgctcacggtttggttcccattctcaaggtttttttttttttttttttccggaaaccatagcaggctccctgactgaggttgtggtacatgaaagatttcctggagtcctgatctgagctaagtcttaaagaacaaggagggttgtcaagataagagcctgtgttttaggcaggggacatagcagtgtcacaaaggcaccctacagtgtggtagaaatggaagctaaaagtagtttggtgtttttagagtgtgagacccaaagtggtgggtagggacaggttgctggtgaagtccaagtcaggaggggctcctaggaagccccactgtaagcttttacttaatcctctgggtggtgcagactcactgaagagtttcaaatgacaggaagggtgacatggttagctttgggctttatgtgtagatcagtaattactgtataaactatggttggcacaaaatacagggcagaagaccacttagaaggcagtttttagtagtttaggtgagaggtgaaagtggccttgctgatagggatggcaggaagcacacagatgtgagaaatagatttaggtggtagaattgggaggtctgtgtatgggagcttaaggaaagccaggaataaccagagcagctgacactgaaggggctaggcactgttctcagagctgcagttgtattatctcattgagtcctcacaacacatctgagatcaaggacccattaccatccctgttttacagatgggaaaactgagtaaaaggaagaaaagtactggcccatccaaggccccagtagttagtggtacggccgggacccaggcatctgactccagagcccatgttctcagccacctcactatggaccactctcatggaaatagcaaggatatgaagatgaggcttctggcttgagtgactgggtgggtggctggtggactccggagacagcacacagaagcaggcagacatgtagggtttatggatatctgagagaaaacggctggtgggcagtacagtagagaagactcaggtggatcaggaagaaatctgcaccagaaagagtgatttgaaaaataacagcagattttggtagaaactgaaagaggcattgagttggtttatggagctatacagagtggaaagataagtaattctgagatggaagcttggggacagccacacctaagagggcccaaattgagactagaatgtgtagcacgagaggagagcaaagcaaggaaggtgtgatctgtggactgatagtgatgaaatgataattgtatgtgtatgggttttttttttttttttttttttttttttgaggcagtctcactgttacccttgccggaatgcagtgggcatgatcatggctcactgtagccttaacttcctgggctcagggtattctcccacttaagcctcccagtagttgggactacaggtgcacgccaccacacctggctaattttttgtattttttgtagagactgggtttcatgattgttgctcaggctggtcttgaactttctgggctcaattatatgttttttttgtttgtttttttgagatggagtctcacttgtcgcccaggccggagtgcagtggtgagatcttggctcactgcaacctccgcctcctgggttcaagtgattctcctgtctcagcctcccaagtagctaggattacaggcgtgtgccaccacacccggctaatttttgtatttttagtagagatggggtttcaccatgttggctaggctggtctcgaacttctgacctcaagtgatccacccacctcagcctcccaagctgctgggtttacaggtgtgagccaccgtgcccagcctcaactgtatttttttttttttttgagacagagtctcgctctgttgcccaggctggagtgcagtggcgcgatcttggctcactgcaagctctgcctcccgggttcacaccattctcctgcctcagcctccctagtagctgggactacaggcgcccaccaccacgcctggctaatttttttgtattttttagtagagatggggtttcaccgtattagccaggatggtctcgatctcctgacctcgtgatctgcctgccttggcctcccaaagtgctgggattacaggcgtgagccaccacgcgtggccctcaactgtacgtttttatccatgtcctcgttttatatgggattcccacattcttgctgaggttcacacagttgttgagccaggatttgaatcaaagattgaatccagcctgaattatttcagagccttactgttaaccattgtgtggtacagcttctcagcacataatgagatccctgaagaagcaggatggaatgggtcaaggatacagggttagcctagaatgggaagtgggccagctcattttcttggaggagaaggtagtaagatagagagtgtgctgtggatggttggtaggaggtgttgaggggagattacttctgttgtacctagtcttggtgaaggtggcaaggttatttgcagagattaatggttaaattagatgtttgatgtgtgaagaaatactttgagagcagtatggaatctgtaatcttactggtggctattaggggattatattatcctgtctttgaggctctgctctgctgatgttcagccttaggggtgaaataattcctctgttccagtccccactcatctctccacctctctgagttctttttttttttttttgagacagagtctcactctgttgcccaggctggagtgcagtggcacgacctgggctcaatgcagcgtctgcctcccaggttcaagcgattctcctgcctcagcctcccgagtagctggaattacaggcgtgtgccaccacgtccggctaattttgtatttttagtagagatggggtttcaccatgttggtcaggctggttttgaactctggacctcaggtgatctgcctgcctcggcctcccaaagtgctgggattacaagcgtgagccaccgcacctggccatagtctatctatgttttttaaaagttcatttcaagcattcttaattgtgtctgatttttgcacaagtttgattttttttttaagttttctcatgaggttgcaatttttgttgttttttgagagagggcctctctgtgttgtccaggctagtcttgagctcctggcctcaagcagtgatcctcctgctttggcgtcccaaattgctgggattacagatgtgagctactgtgccaggctgcactggtctactttttttttttttttttttttttttgagacggagtcttgctctgttgcccaggctggagtacagtggtgcaatcgcagctcactgcaacctccgcctcccctgttgaagtgattctcctgcctcagcctcctgggtagctgggattacaggcacacaccaccacacctggcttatttttgtatttttagtagagatggcatttcaccatgttggccaggttggtctcaaactcctgacctcaggtgatcctcctgcctcggcctcccaaagtgctgggattacaggtgtgagccaccgtgccctgcccacactggtctagttttaaaccactggaagacagagatttaatcctttaaactacttgtgtatttccccaaatgcttatagttgggcacatgctaagtatttagtcaattcttgccactgttaatcagtcatttgttagcagttacaaatttgcatagaagaagaaagcatggatttttttgttgacagtgaattttctttataaacacaagggggtgctctttaaccatcaatgaccagtttaaaaaaagtttaaagtcattttaaagccttagaaggaagcctgcataaggcaaattgctacaggaacagtaatacattttagggctgtgcacagtgtttcatgcctgtaatctcagcactttgggaggctgaggcaggcggatcacgaggtcaagagattgagaccatcctggcaaacgtggtgaaaccctgtctctactaaaaatacaaaaattagctgttgtggtggtgcgtgcttgtagtcccagctacttgggaggctgaggcaggaggagaatcatttgaacccaggaggcggaggttgcaatgagccgagatcatgccactgcactccagcctggtgacagagcaagactgtctcaaaaaaaaaaaaaaaaaaaaatttaggtggtaggtattttagctatcctttaaaatttaaagattctttttaagatttattttccctaaaaatacaagacttaaaaaaatatgtgtattattcctaggtaactccagaagatcccggagctcagttcttgattcgtactgggtctgttggccgaaatagggctgaagcctctttggagcgagctcagaatctcaaccccatggtggatgtgaaggtggacactgaggatatagagaagaaaccagagtcatttttcactcaattcgatgctgtaagtttcttattataaaatctgctgtgggaattaaacaaattaaggtgctagttgtatatactttcaaatcccaaagcaatctgagagcattcaaatatcaaattctgagctttttcccaagaaaatgtataagctgttctattgtttaggcttagtatattgtgtgaatgtgttgctagagaggtccagtctgttgcatctgctgtagttgttggtgacttgctgtctgctggcttcttctctgggcatatgttccctcagccaggtttcgtctttggtgttttgtcttccttccagaatctttgcacataactttaatccatgttattgcaaatgttttcttccgaaaacttaacaagttggtgattaatttctgtggcagcggcatttttttgttagaaatatcaaactacagcttgtgttttgtcttaagaaaagcacacctgatcttgatctatgtctgtctgtctgtttctcacagtcacattgaccatgttgccatggataactagagaaaaatcactgtagtcgtaagtcaaatgaggcatatccagcctcatttagtttcactgccaaatctatgcggaggtgaaaggataaattctttgtcaatatctgcaacctttcagacatagttccctgcattctggaaaagcttaacaaatcttgataaatgtgaaatagtcatagatgagctactagttttttaaatgaaaggccccagtatgttacatgagaggttagaatttgggttgggtagttttttttttttgcacctttttttatttgagatggagttttgctcttgtcgcccaggctggagtgcaattgtgcgatcttggctcatggcaacctctgcctcctgggttcaagtgattctcctgcctcagcctcccaagtagctaggattacaggcactcaccaccatgctgggctaattttttgtatttttagtagagatggggtttcaccatgttggtcaggctggtcttgaacccctgacctcaggtaatccacctgcctcggcctcccaaagtggtgggattacaggtgtgagccactgcacctggcctgttttttacacttttctttctttctttctttcttttttgagatggagtctcactctgtcgcccaggctggagtgcagtggcatgatcttggctcactgcaacctccgcctccctggtttaagcagttttctgcctcagcctcccgtttttacacttttctatttcatatgtgcatctgttcaaatatgggcttggaaggatggatcatctgtgcatttgtcctgttttctttttcctagtcccttctattttttaacttgaggtattgggacactttccatttggacataagtcttcattttcttatctgtagtaaccacatttattttatgccaggtgtcccttgaacttgtagagttagagggtttgttaaaactgaagtgtgaggccagttgattgtgtaatgcgtgtgcatggggccatgttgaccgccttgcaggccgtgtttggctggtccttgcaggttttatagttactttagactctgcagggttccatttgatcaattggttgcatgttcacctgtggatttcttactttttagatgggatttttccttgggtggctgcattctttgaaacaccaaaggaacacatttctctgtgagtgttatttcggtattcaggctgctagacaacagcaaagagggtctatcaagtgaaaatgtccttttgttcaggagaaagcatgtgcaatttggaagttgtcttttgaccatgatcacaaagcttctcccgaaaagatggtattttgtgcagtagaacttagccatttccaatacctcaacttactggaatacaacctggaggccccagagcaacactgataattccactgagtggatcaccagttcattgtctaagcctgaatggaaggtcacttggtctgtaaccttttcttttgtccttaaattcagataaagtttcacaccgcaatctgtggaaaaatgatctcaacaggacttgtttatcttctttatcttaacatatcaatcaaaaggaggggggtaaaaagcccttgtatttaaacatgacctttgggtcaatttaaaaaactggttttgcttgtccctgtagcttatttggattttaatagatttagcagtatagaaacaacttgctaagttattttttttatgagaactatgaaatgtgtatatgttcgtggattacagaaaacatttgttgaatggcttttactttttagctaaacacattttattttggctgcagaacgtgacggtctcataacttatattttctacacattgaaacctgcaacttttcttttgtcttctagccatagggcccaaagaacctgttgtaccagtttgaaacatgctttgagcatgcccagagagactgttcattaagatttatttagacatcagggcagtgattcacagtttgcaaaactcaaacccagccaatttctttctttctgcaggtgtgtctgacttgctgctccagggatgtcatagttaaagttgaccagatctgtcacaaaaatagcatcaagttctttacaggagatgtttttggctaccatggatacacatttgccaatctaggagagcatgagtttgtagagtaagtgttgggagaggaggggagaacataacattttctcctttttatactttttttttttaaattatgtatttatttatgtgtagagacaggatctatgctatgttgttcaagctggtcttgaactcctgggctcaagtgatcctcccaccttggcctcccaaagtgctgggattataggcatgatccactgcgcctggtctgctgacatgttttcaagttgagagatagtaaaatgattacaaaatagttgggcgattctggaggcatattcaaccaaagtctaccttggaaaaggtgtccaatatccagagagactcctctggtagaacaaacagacctcatcctctcattttgaacactgaggctgcagaacttggtaattcttacatgacaggacttgccgtgttttgactttgtagtctctaggtgaaagatggcagatgatacattattgtaaaactatatgagttaggtattttggctgcagtttctgaccaccccctccaaaaccctccaacttgctaattgagagggaaagacaggctctgtgagataggagcttcctaccaagagactgagaactcttctcttgttcagcctctcaggcaagtcactgaaatttctctggtctccaagtttcttgcctgtaaaatcaagatgggggaaggacagtcatgttccagacatctcctaactctagtgttttatggctttaggataatctagttctttgggcatattattattattattattttattttttgagacggagttttgctgttgttgcccaggctggagtgcaatggcaccatctcagttcagaacaatctctgcctcctgggttcaagccattctcctgcctcagcctccggagtagctgagattacaggcatgcgtcaccatgcctggctaattttgtatttttagtagagacagggtttttccatgttggtcaggctggtcttgaactccggacctcaggtgatccacccacctcggcctcccaaagtgctgggattacacaggcgtgagccaccgcacccggctattattattatttttgagacggagttttgcttttgtcacccaggctggagtgccatggcacgatcttggctcactgcaacctccacctcctggattcaagtggttctcctgcttcagcttcctgagtagctgggactgcaggcacccgccaccatgcccggcaaatttttgtatttttagcagagacggggtttcactatgttggctatgctggtcttgaactcctgacctcaggtggtccacccacctcagcttcacaaagtactaggattacagccaccatgcctggcttctttgggtatattataaagaagttatagtagtgggaagcaatccagattattttaacataagctgcccacagcagaggggcagaattaagtttggcttttttttttttttttttttttttttttttctgagacagactttcactcagttgcccaggctggagtacagtggcgtgatctcagctcattgcaacctcctcctcctggggtcaaccaattctcctgcctcagcctcccaagtagctgggattacaggcgcccaccaccacgcccggctagttttttgtatttttagtagagacggggttttgctatgttggccaggatggtctcaaacccttgacctcaggtgacacgcccgccttggcctcccacagtgctgggattacaggcgtgagccactgcacccagccaagtttggctatttatttcatgattcaagtagagtgtttacaaagtaatcactttgatttattgagagcagctgtgtgcccagcagtgtgctgagcaacttacgctgctctgtttttcccacaataatttcctgagtgcccaacagtgtaccagactcatcatgttatcaatggcagagctcgatttgaaccgagatctgactccaaagcttttgcccttaaccaccatcccgatctgtgacctggagaggctttttttgattccaataacatgattcctagggtaaaattacattctctccccttgtcaccctctagggagaaaactaaagttgccaaagttagccaaggagtagaagatgggcccgacaccaagagagcaaaacttgattcttctgagacaacgatggtcaaaaaggtatgtgtaacgtgggggcagaggtcagaaaccctggggccttggaggggtcaggcaatgacgattgaaaaggataagagcaagcacttcttgaaggggtggggcgggtgcttgtcccatctaaagggaggctgccacagcttagtgtcagccagctgttgctgtgagggaatgtgggcccagtgattccagatgggatttttcaagacaatgagaaatgcaaacttttgtaggctctgtcccaaacttttttttttgtgtgtgtgagatggaattttttcttgtcgctcaggctggagtgcaatggcatgatctcggctcactacagcctccacctcctgggttcaagcaattctcctgcctcatcctcccaagtagcacccctggctaatttttttttgtatttttagtagagacggggtttcaccatgttggccaggctggtctcgaactcctgacctcaggtgatccacccgcctcagcctcccaaagtgctgggattacaggcgtgagccaccatgcccggccccataccctttttttttttttttttgagatggagtcttgctgtgtccaggctggagtggcacaatctcagctcactgcaacctccacgtcccaggttcaagagattttcctgcctcagcctcccaagtagctgggactacaggtgtgtgccaccacacccagctaatttttgtatttttagtagagacggggttccaccatgttggccaggatggtatttatctcttgacctcgtggtccacctgcctcagccccacaaagtgctgggattacaggcatgagccaccatgcccgaccagaaaacttttttttttaaagcagcaaaacaccagccctgggttacagtagcaagaccccgtgtctacaaaaaaaatgtaaaaatttgtctggcgtgatggtgagcacctgtaggcccagctactcataggctgagctgggaggattgtttgagcctgggaggtggaggctgcagtgagccatggtcacaccactgcaccccaacctgggccacctagcaagatcctgtctaaaaaaaaaaaaagcaaaacaaaaaattttttgtattttctctactaacaatacaaaaattagctgggcaaggtggtgcgttgcttgtagtcccagctacttgggaggctgaggcaggagaatagcttgaactggggaggcggatgttgcagtgagccgagacggcaacactgcactccagcctggcgacagaacgagactctgtctccaaaaaaaaaagttttctttgcctgtttttttccttttgccaaataacctttaataagaaaaatccttcaatgttgtcttgctgtgtccaggctggagtggcacaatctcagctcactgcaacctccacgtcccaggttcaagagattttcctgcctcagcctcccaagtagctgggactacaggtgtgtgccaccacacccagctaatttttgtatttttagtagagatggggttccaccatgttggccaggatggtatgaatcctcagattcatatttgttaatgtagtttatattaggggctcagcctctatttggattaggtgcaataattacatttatagaaaggagtggagaagggatcagaagacgatggtttctgtagctagtgctggaatctgagatgggaaccatgcgatggggaaagcaagatgaaggggccagaattggtttcattgaactgagaggaaagacatgaccaagcccatatttactctttgctttgtagatttaaatgttgagaaagaaaaacagctggtcagaatgttgagttaaattacgctaacgaggggattctaaagagtgcagaaaccacaaaagagactgcagaaaaccacaaaagtggaactctcagactctccagcaaggcggcgttggagattttctttctcattttgtgtttgtgttggagtagtttggtgctgtaagtgtgatacagaggaattaagccctaattttagtgtctattcacagaaccataattatccagagtgaaccttggtgttttggccaaaacttgggtgcctttctttctttttgaggcccagtcaagatttatctgaatagctccgtgaatttggtggggggagataaattgttaacaaacggaggagtacaaaagctgctttgtgggtgctgtcagtttataaatcacaccctcttacaagtgtgacacttggccttggtgtgaagggttttatggcttaagggccttctctgattgaggcaggtctttcacattcaaatggagagagtgcctagctttgttagccattcacagctggaagtttccctggagtcagttctgatggtgcccactggggtggatctggaaacctcttttgggaaccactttatctcgctatgaggagaatgtgggcagcccaggcctttgcccaccattccggagggccctacaggcacagaggtttttgtgcagcctcttcctacgtggagctgagctggaaggtatcaaaatattccccagctgacattgttagtcagctgttacacttgaacaatgcaggctcggattccaaccccaagcccttaaggttacgaggcattcagtgcattcctgctgacaatccctgggattccaaaccttgcctttgtgcagcctcaccaagggccctgcggaccgactgggctggactgggttttggccatggctttgtcaccttgcaataacatgcctccttccgttttggcacagatggccctgtgatttcaaggttctcttccaacaccaaagattccttgattcagatgctgcccttttgcctaattgtacagaataactagttgggttgtgctcagagagtgcagggtgggggtggggaagcagctacttcctgtttcctgtgaaaggttttctggttagggttcccttcccctccccgctttccctaggtttaaccaaaggttgtaaagccacttttgcttcaaggtacactttgtgctcctaaattagtaacgttgaaaaacaaaaaggaaaaacagcctgtggttttcacaccctctaggaagctggtgggcctttctagcacctgtgccattctgataaataagggcttaggaaaatgcctagcccagaaataggtgctcagtagtttgtttgcttcctttggtgctcaggagaagatttgagacggatttcgtcacaatcaggtctcgggcacaagcctcacatggacactgacatgcaggagccagaggagacagcaatgaggtggtggtaaggaagtgcccaaaaaggtttcccagaggaagagttgtttgtgttggcatgtgagggacaagctttccaggcaccagagccaagagcagtgctctgtccgaggaagtaggataaaccgaaagacggacgtaggggcagagttgctgtggctgccctcactgccgcagccagctccttccatgagttgcagaatgcctactgtgtgcaaggcactgtgttgagtgcagggaatcacatccagtcttgttgtccccatctatagctgataaagaagctatgagaaattaagtgacctgaccaaggccacacagctgtggaagaaggggcgagagcatagacagtgggtaagggcataggctcaccctatgatttacaaagagggatacccctgaagttgctagggtaacgtgacatattaggaggatggtgggataaaatatgtgaacatcgggatcattctggaaaacctttaggataaaaggccactgtcatgctcccatgttcacgtttctttattgtgagttatctgtgttaggtgctgccagagatgatgagatgcctgacagtggttactctgtaatagctctttaaaaattaaagacaaagtagggtttgttcctgactgtactagaaatacagatttaattttacctctgctcctgaaataggtgactaatttggagtactattaatactcttttcatgaattagttgagaaattccacagttgaggagtgattcattcttttgactccctctttctgagcaatttgttgacagccttctcatcctctcttacacccgtcattaaagaaacagtcgagttctttttctttcatgtggtaccttggtttccactgctggtggcccttaggttgcttgtctctgtctccccgcttccattttaagctccatagggggaaggtagtcttgttcactgctagactcctagtccagtgtgtagcacagtcatatccacggaatatttgttcagtgtactggtggctgttaactgcagcataatccagcaaccctggagattattttcttcctttttttttttttttctttgaagcagggtctgactactctgtcacctaggctgaagtgcagtggttcaaacactgctcactgcagcctcccaagtagctggaattacagacatccactacacctggctaatttttaatttttaaaaattattattatttctgagatggagtcttgctgtgtcacccaggctggagtgcagtggcacaatctcagctcactgcagcctctgcctcctgggttcaagcaattctcctgcctcagcttccggagtagctggaactgccagtgtgtgccaccacactcgactggtttttgtatttttagtagagacggtatttctccatattggccaggctggtctcgaactcctggcctcaagtgatccgcccactttggcctcccaaagtactgggattataggcgtgagccacagcttccagcctgattgtttccattttaaaaaagagtaattgaagtaacctttgttaccaatgaaatgaattaaccttctagtatattaattctcacggtttaggttatttgaactaagctgagagaacagaataccaaagaagacaatagacttgcccagaaatatttagaagtaagtcactcagttgcctggattggaaccctcaggccagagaggttcaaaatcctgcatttttttttttttttttttttttttgagacagagtctcactctatcacccaagctggagtgcaatggtgcgatctcggctcactgcaacctccgcctcccgggtttaagcgattctcctgcgttagccttccgagtagctggaactacaggtgcgcgccaccacgcccagctaattttttttttttttttttttttttgagatggactctcgctctgtcgcccaggctggagtgcagtggtgcgatctcagctcactgcaagctccacctcctgggttcatgccgttctcctgcctcagcctcccgagtagctgggactacagatgcccgccgccatgcccgactaatttttttgtatttctagtagagatggggtttcaccgtgttagccaggatggtctcgatctcctgacctcgtgatccgcccacctcggcctcccaaagtgctgggattacaggcgtgagccaccgtgcccagcctaatttttgtatttttagtagaaacggggtttcaccatgttgaccaggatggtctcaatctcctgaccttgtgatccacccgcctcagcctcccaaagtgctgggattacaggcgtgagccaccactcctggccaatcctgctaattattaatatcagaactacttggttcaaaggagtggaaatagggcaacgaggggtgtaaatttgcagttaggtggaatgctgatagcaagttttccaggtaggagagttagttggggtgggggatgctaatgttagcttatctctgtatatatatttaattttatatgttatttatttttgagatgggatgtaactctgtagcccaggctggagtgcagtggcacaaacacagctcactgcagccttgaactcctgggctaaagggatcctcccacccacctcagtctccaaggtagctgggaccacaggcatgtgccaccatgctctgctaattttttcgggtttttttttttttttgagatctcttgctgtgttgcccaggctgatctcaaactcctggcctcaagtgatcctcttgccttggcctctcaaagtgctgagattataggcatgagccaccgtacccagcctatattttttttattgtgacatttaatgcacaaaagaagatatgcagcatcaatgcagataatggaacaaaacaaacactatccgccttaaaaacacaaatatttttggtacttttgtaccaatctgtatgctgtttctctatcttctacttcttctccctgtaccctcaccaggtaagtaaccccagagctgctggtacatttgtgtggattaaaaaagacacctggaaggggcagatacagccctgcttgacttcctgttttatcacgtgtttataaatctaaacaatgacatggaacttattatacaatattttaggcataaattaagaatgatttcgctcaccatcatagacctaccactcaatttgaagcatcaaacattactggtatggtgaggccctctggctgtccctccaacagaagttaccaccctcctcagttgggtttctcattcctatgcatttcttcttactacttatgtatgtatttccaagcaacacatagaattgctttgcatgctttttatcttcttaaaaattggttttatattgtatgcatggtgccacctgcttttaaggagaagcaacacgtttgtgaggccatctgtttatatgttgttctagggctttgctgtccattttggtagccactagccacagctggctgtttaaattaattaaaatcaaatcaaatcaaatatttagttcctcagtctcactggtcacatttcaagtggccagtaagcacatgtggccattggcatctgtattgcatagcacagattacattctgttccatcatcacagctagttctcttggacagccctgcagggcatttctttttggtttttgttttgtttttatttttgttttttgctagagtctttgttgtgtaaatacattactattttatatccatttttctatttataagcatttgggtatgctcataatttgctgttacaaattgtgctgcataagcattttgtttgtgtgtgtatagatgatctccttgggcaattgtgttaatttctcttgggtatatacctgggagtaaaattaagataagggcattttcagctttaccagaccccgttaagttactctcaagtggttttatcaatttatattctagaaccaacattatgtatcagtaacatttggtaacttcaggcgttttttttccattctgctgagtgtgaaaaatgtgttttgattatggttgtcatttgttagaatactttgttaaagctttttaaagattcttggtccctctaccctccccaccccctaccccaggaattttgattgggtaggacctggggattatattcatctttatatgcagaattatattacttgttactgttaggcctgatttaagaagtaaaataaggctgggtgcagtggctcatgcctgtaatcccagcactttgggaagccaaagtgggcacatcacttgagcccaggagtttgagaccagcctgggcaatgtggctaaaaccccttctctaccaaaaatacaaaaattagctgggcgtggtagcacgtgccagtggtctcagctactggggaagctgaggcgggaggattgcctgagcctggcaagtgtaggcagcagtgagctgagattgtgccactgtagtacatcctgggtgacagagcaacacactgtctcaaaaaaaaatttttttttaagtaaaataagttcataattccaaatgtggaaaatgcagaacaagttaatgaaatgttaatcctactaccaaatgataactataaccttcctttcagtatttttctatgtatatacaacaaaattggggcactgtttaatacagataatatatatagttagctctccttattaatgggcttcacattcatggattcaaccaactgtggatcaaaaatctttagtgtgcttggagtacatccaaaaaaaaaaaaagaaaattgaaattatgttaataataaaatatttgggaaaaaacattgcgtctatctgtaccaaacatgtacagactttttttcttgtcattattccctaagcaatacaatataacaactgtttacatagcaattccattaggtattataagtaatctagagatgatttaaagtatatgggaggccaggcgcagtgcctcacgcctgaaatcccagcactttgggaggccaaggcgggtggatcacttgaggtcaggagttggagaccagcctggccaacatggtgaaaccccatctctaacagaaatacaaaattagctgggcatggtggctcacacctgtaatcccagctactcaggaggctgaggcaggagaatcacttgaacttgggaggcagaggttgcagtgagccaagatcgcaccgttgcactccagcctgggcgacagagcaagactctatctcaaaaataaataaataaataaagtatatgggaggatgcacgtagagtatatgcaagtactgtgccatttatttatttagagacagagtcttgctttattgcccaggctggagcgcagtggcgtgatctccgtctcccaggttcaagtgatcctctggcctcagcctcccgagtagctgggattacaggcttgtgctaccacacccggctaagttttgtattttaagtagagggcgttttcaccttgttcgccaggctggtctcgaactcctgacctcaggtgatccgcccacatcggcctcccaaagttttgggattacaggcgtgagccattgcacctggcttgtatatgtgtatatatatgtacatggttttgtcttttgcttttttcactcaataagcattccccaaatctgctttggagcacatgattttattttatttttatttttttatttttttgagacgaagtctcgatctgtcgcccaggctggagtgcagtggcgcaatctcggctcactgcaagctctgcctcctgggttcacgccattctcctgcctcagcctcccgagtagctgggactacagacacccgccaccacacccggctaattttttgtatttttagtagagacgggtttcaccgtgttagctaggatggtctccatctgctgacctcgtgatccgcccgccttggcctcccaaagtgctgggattacaggcatgagccaccacgtctggcctggagcgcgtgattttaaatgtctgtgtcatttttcctcttcttgcctagccataatctattttaccagtcacctattgtattgaggttattgaggttattgcagtttcctactatgctaaatggctcctgacaacaaatttgatggttgatgggctatgtggagaattcacctttttttttttttttttttttttttttgagacagagtctttctctgtcacccaggcgggagtgcagtggcatgatctcagctcactgcaacctctgcctcccaggttcaagcgattctcctgcctcagcctcctgagtagatggaactacaggcacctgccaccacgcccagctaattttatttttgtatttttagtagagagggggtttcaccgtgttagccaggatggtctcgatctcctgacctcgtgatccgcctgcctcagcctcccaaagtgctgggattacaggcgtgagccacagtgcccggctaatttttgtatttttagtagagacggagtttcaccatattggccaggctggtctcgaactccagaccttgtgatccactcaccttggcctcccaaagtgctgggattacaggcatgagccaagtctttttttttttttttttttttttttgagacggagtcttgctctcttgcccaggctggagtacagtggtttgattgtgatctcggctcactgcaacctcagcctcctgggttcaagcgattctcctgtctcagcctcccaagtagctgggattacaggcacatgccaccatgtccggctaatttttatatttttagtggagacggggtttcaccatgttggccaggctggtctcgaactcctgacctcaggtggtctacccaccttggcctcccaaagtgctgggattataggtgtgagccaccgcacccggccttgttattagtcttaactagattgttgattgaagtccttaagcccagaaatgtatgtgaaggatggtggagaagagtggctcaggcattctaggcagaggtattcttgagctgaggaagtggaggagaggaggtatgtaagttacctgttttcaggggttcattccagtggatagtggatgccactccctggcagacactgtgggtgcctcacctgaaagactcctgattccctgaaggcattgtcgggtgtattttttctttataagcgtaatgccagtggagtgggtaagacaggtaccaccttttgcatctgctgctacagattaggcagcttggttaagttttgttttgtttttaattgttatgagttagtttgaaccaaaaggattgttaagtggagtgtaagaagcactgaataactactgttatctgagaggagtagtaaagaccagggccactgggcaatcccagaggcattaggaatttgtggcctttccctttagagcattgtcattatgtgtatctgcatctctgcattccaactttcacattttcagttcccaggagagagaatctgattggcctggttggggtcctgtgcccacttctggctgtcacctgtggctttcttccctcagttgtagaccacactctggatacctgggacccctgaaatctcctgcccagacaaccccaagcttctcaggactttttgtgggctgcttccctgttctgcctgtgcagtgcaggccttgtcacaatgtctgaatgcttaggccagagacgtgggggtttggtgagaaaggatgagctgggtagctacactcaagtgcagagccaccagtattgtgggacagagccaggcatgggaagagaagtgggcacggatgggggccagctttcccgatgtgccttaatctggcacagaactcctaaggagtgtgaaaatttcaaatttgatccaggccttccaggtggttatgaagaaggcgagtttgtcaagacaggataatacaatatacttcatttaatagcttgttagtgtgatttataactaaatatgtagacatcatatatgggtcttcattcatactcttgccccaggccctgaaagtgttagctaacaggcaagacctgcctgggactgagattctaaaacacaacctccacccccaactccgtttcatcatatagtagcctaacatattagttggttcgttgcttatagtcaggcaaacaacaaagactccgaattgagctcttggtaatttttgaaacctgcctggtaatactgtgtttcctcattctgatggcattcccagaccatattgcaaatgacttgatgtgtattttcagacttgttgagaagggcctggtggtctatatagcaggcataaaatgtcaccaggccgacttcatgacttatcttttgaggtcaaacagacccattgaccaaaagatttgagggcagtgaaaacatcttgtatactatctttaacaatggatttaactcctaaaggaaagccacctaaacatgactgtttaatcttcactagcaatttgaacttttttttttttgagacggcgtctcaccttgttgcccaggctggagtgtagtggtgtgaccttggctcgctgcaacctccacctcctgggtccaagtgattctgctccctcagcttcctgagcagctgggattacaggtgcctgccaccacacccagctaatttttttgtatttttagtagagacagggtttcaccgtgttggccaggctggtctccaattcctgacctctagtgatccacccgccttggcctcccaaaatgctaggattacaggtgtgagccaccacacccggcctgcgcccagataatttttgtattttttttttttttgagagtctcgctctgtcccccaggctggggtgtagtggcacgatgggttcacgccattctcctgcctcagcctcccgagtagctgggactgcaggtgcctgccaccacgcctggctaatttttttgtatttttagtagagacggagtttcgccatgttagccaggatggtctcgatctcctgaccttgtgatctgcccgccttggcctcccaaagtgctgggattacaggtgtgagccactgcgcccagccaacaatttgaacttttatctgtcaaatctatatgcatccttagcaagctttgtaaactgcctggtaactgatagatcttggttcacttagcttcccaaattatgctgttatcatcttgtctctctgttctttaaatatctggttgggagggtatggagagagagggaggaagaaagacacctctgtaagtttgaaattatttgcatcccccccaccgcccaccaccaacctttttaaaatatagagacacagagtctataccacgcctggcctaaaataattttttttagagacgggatctaacagtgttcccccagcttggctatcttaaacttcttaagggtagctagttctaagaactgcttttttctggctaggcacagtggctcacgcctataatcccaacactttgggagaccgaggcaggcagatcacctaaggtcaggagtttgagactagcctgggcaatatagtgaaatcctgtctctactaaaaatacaaaaattagctgggcgtggtggcatgcatctgtaatcccagctactgggggcgctgaggcacgagaattgcttgaacccaggacacggaggttgcagcgagctgagatcatgcactgcactccagcctgggtgacagagggggagactgtctggaaaaaaaaaatgtttaaaacaaaaaactgtttttttgtatgtgtgtttatatgcgaaccatttgtgaaagtggtcccagcatgatgccacatgtgtcatttccaaatatttcagtctgtatttttttctctctctctctgttttttctgtcacccaggctggagtgcagtggtacgatctggctcactgcagcctcgacctcctgtgctaaaacagttctcttgcctcagcctcctgtgaagctggtaccacaggtgcatgccactgcacccagctaacttgtagagattggggtctcactttgttgcccaggctgttatttgactcctggactcaggtgatcatgccactttggcctgccagagtgctgagattacaaaagtgagccaccacactcagccataaatgtgttgttgttgttgtttttgagacagagtttcgctcttgttgctgaggctggagtgcaatggcgcgatctcagctcactgcaacctcccccctcctaggttcaagcgattctcctgcctcagcctcccaggtagttgggattacaggtgcctgccaccacgtccaactaatttttgtatttttaatagagacggggtttcactatgttggtcaggctggtcttgaactcctgacctcaggcgatccacccgcctcggcctcccaaagtgctaggatcacaggcgtgagccactgtgcctggacttgtaaatggtatttcaaagtaaaatatatgtcattgcatttatcaagataatttgattgagctttgtaggtcctagccatccttctgcctattactgggctttttgcaaatgctgttcctgtttccacaacctggagcattgtcccatcccttttattgtttctcttgctgttatttattatgtcatccatcatcattataccattcctctgccaagaaacatttaatttttgtttttgtttactattacaaaaatgttttatagaatattgttagacttacattcttgcccctcattgtggaagtattcctgtagtatgaatacagccagaggttttttagttttgttttggtttttttgaggagtcttactccttcatccagaggctggagtgcagtgacgcgatcttggctcgctgcaaactccacctcctgggttcaagcgattctcctgcctcagcctcccaagtatctgggactacaggcggccgccagcatgcctagctaatttttgtatatttgtagagacgggggtttcaccatgttggccaggctggtctcgaactcctgacctcatgtgatccgcctgcctcggtctccaaagtgttgggattacaggtgtgacccaccgcgcctggcccagtgagagttaaagggccagagtggaagcaggtctttggaagcttggctctgtcttccttcagtgcagggagtttgtgttgtccatccccagcctctacagaagcacacagtgagtgttcaataagcatttcttggatcaaatggcccctgcttcttttaatggtcagtaaactttaaataatgagatttttctgcaatagagaagagcaactgccttgtgattggaagccagcatatgttattcctaagcagttctgccttttttccacagaaggtggtcttctgccctgttaaagaagccctggaggtggactggagcagtgagaaagcaaaggctgctctgaagcgcacgacctccgactactttctccttcaaggtgaggtctcaaagcacaacttaccccgggagagcttttggctctgatttctgcaaatgtggttgcaaggtccagatggttttgtgatgtttgccttgggtggcattcttcattggctagttctcagtgatcacttgagaaaggggtggtcacttgaagggggtgaggtctaccattgagctctgggttctaatgacttctcctttttttacttgttgaaatgacctccctgtcaagttgaccttatggtaatagtgttacaggtcacagattgagaaacctctttttttttcttttttctttttttgagacagagtcttgctctgtcacccagactggagtgcagtggggtgcaatcttggctcactgcaacctccacctcctgggttgaagcgattctggtgtcttagtgtccccagaagctgggatgacaggcatgcaccactgcgcccggctaatttttgtattttgagtagagatggggtttcaccatgatgcccaggccctgaagttctgagattataggcatgagccaccatgtgaagcctgatcaaccaacttctcttcaccgccccccgcctttttttttttttttttttttgagacagagtcttgctctgtcacccaggctggaatgcagtagcgctatcatggttcactgtagcctctacttcctgggcttaagtgctccccatgcctcaggctcctgagtagctggtactacaagcacacgccactgtgcccagctagtttttgtatttttttgtagaagcgaagtttctccatgtagccaggctggacttgaactcctgagctctagtgaaatccccgcgttggccttccaaagtgctggagttaaaggcgtaagccaccagtgcttgttcccctcttcagaattctttctctgcctcaaaaccatcctcacgcttatgaaaggtggggttgtttttcctcttgctattaatgaactacttatcagtccatctttgctggtggtcaagagactgttagtaagtattggttggcttttcagtgttcttcctgtacctggcacttttttgtttgtttttgagatggagtctcgctctgtccccaggctggagtgcagtggtgtgatcttggctcactgtaacctctgcctcctgggttcaagcgattcttctgcctcagcctcccgagtagctgggactgcaggcgcgtgccaccacacccagctaatttttatatttttagtagagacagggtttcaccatgttggccaggttgggctcactctcttgacctcgtgatccgcccacctcagccccccaaagtgctgtgattacaggtgtgagccaccgcgcctggcaaacctggcacttttaatttttattttaattttttttttggagacggagtctagctctgtcgcccaggctggagtgcagtggcacgatcttggcacactgcaacctctgcctcccaggctcaagcaattctcctgcctcagcctcccgagtagctgaaatacaggcgggcaccaccatgcccagctaattttctttttttttgagatggagtctcactctgttgcccaggagagcagtggcgtgatcttggctcactgcaacctccacctcccaggttcaagcgattctcctgcctcagcatcctgagtagctgggatcacaggcacctgccaccacgcttggctaattttttgtatttttagtatttttgtattttttttgtattttcaccatcttggccaggctggtctcgaactcctgacctcaggtgatctgcccacctcagtctcccaaagtgttgggattacagacgtgagccactgcacctggctgcgctaatttttgtattttagtagagacagggtttcaccatgttggccaggctggtcttgaactcctgaccccaggtgatctgcccacctcagcctcccaaagtgctgggattacaggcatggtagttttttaaaaagtattttttttaatgttatttatgcatttatttttttgagacggagtctcactctgtcacccaggctggagtgcagtggtgcaatcttggctcactgcaacctccacctcccggttcaaacagtttccccgcctcagcctcccgagtagctgggattacaggtgcccaccagcacacccagctaatttttgtatttttagtagaaacggggtttcaccatgttggccaggctggcctcaaactcccaacctcagatgatccacctgcctcggcctcccgaagtgctgggattacaggcgtgagccaccacgctcagctggatgaactatttgaaagtcccgaatatccatttgtgtagaaataaatgggttgagcaggaatgagtgttgcatgtgagtgggctgcactcagaaaatgcctcctcttgatagtgggatcaggtgtggaagaggcaccagcagtaagagcagagtcttttccatgtgggaacagtgcctgggccctttgggagaagcttgttgctcactgcctcgcacatagaaagccctcaggaaacaatggcgctaatttgccaaggtttgggtttgacttgagcatctctaactgctgcttatgaaaggagtcaactgggctgggctactaaaaatacaaaaattagccggatgaggtggtgtgcgcctgtaatcccagctactcgggaggctgaggcagaagcacttaaacctaggaggcaaaagttgcagaatccgagatcatgccaaagcactccagcctgggtgacagagctgaactccatctccaaaaaaaagggggagaaacagagtcaatcacagatcatctactccagagttgaaaagtgtacacgccaaaaaaaaaaaagagaaaagaaaaaaagcacatatcttcacggatgacagagttctctaggacttgctctgtgccgggcgttttccatgtatatcaccttcatctcacaaaggccctcaggcaagtgctattaacaccaccagctacagaggggaatctgaggctcagggaatttaaagtcagtggctcaagatcacccatctaaaacaaaatggcagtgcccactggaagccaggtctgttttgattccaaaggtcttgttctttttctttttccccagagacagagtcttgctctatcacccaggtaggagtgcagtggggcgatcttggctcactgcaacttctgcctcctgggttcgagcgattctacaggcacgcaccaccacacccagctaatttttgtattcttagtagaggcagggttccaccgtgttggccaggctggtctcgaactcttgacctcgtgaaccgcctgcctcggcctcccaaagtgctgggattagaggcgtgagccaccgcgcccggcccaaagtcttgttcggaacaaccatgcaccactgcctgccacagaagtcatatagctactgtttcttcctcaaccacctgtccacccctccaaccccgtaacttctgatgctgatgtccagtagcacctgcactgaatattcactttgctcctagatatcagttttgtcccctcagttcaatgacccctgtgatgttgagatggatgagaaaatactctggaaactgcagaggataaaatcaggatttcctcacttcagcacactactgacattctgtgctggataacactgtcacgggggactgtcctgtgcactgtgggatatttagtaacacccctatcctctactcactagatgccagtaatatctccccacccagctctaacatcaaaaaatgtttccagacaccactgccacatgtccccagttgagaaccactggattatgctaaactcaaaggccagttgactcctttcttttctttcttttcttttttttttttttttgagacggagtctctctctgtcacccaggctggagtgcagtggtgcaatctcagctcactgcaagctcagcctcctgggttcacgccattctcctgcctcagcctcccgactagctgggactacaggcgcctgccactatgcctggctaattttttgtatttttagtagagacggggtttcaccgcgttagccaggatggtctcgaactcctgacctcgtgatccacccgcctcggcctcccaaagtgctgggattacagacgtgagccacttcgcccagcctgtttacccttaattccatccctcagtgggtattatggcaacagtctcatgagtgcctatgaccctttgctggataatatatcctatcatgtttaccactctctcccagatggcattaattatctgtctttttcagttttgagttccagggctttggatatggtaatcaaaacattaaaactatgtgcagtaaatttcttttcttttttctttttctttttttttttttttggtgtggtgaaaagcacataacataaaatttaccattataacttaagcgtataggtcagtaataatcatacaatgttttattttattttgtttttttctgagatggagtttcgctcttgttgaccaggctggagtgcaatggtgcgatctcggttcaccacaacctccacctcccaggtttaagcaattctcctgcctcagccttctgagtagctgggattacaggcatatgtcaccacgcctggcaaatttttttttttttttttttttttttgtgagacggagtctcgctctgtctcccagcctggagtgcagtggcatgatctcagctcactgcaagctctgcctcccgggttcacgccattctcctgcctcagcctcccgagtagctgggactacaggtgcccgccaccatgcccggctaatttttttgtatttttagtagagacggggtttcaccatgttagccaggatggtctcgatgttctgacctcgtgatccgcctgcctcagcctcccaaagtgctgggattacaggcgtgagccaccgcgcctggccacatttttgtatttttagtagagacggggtttcaccatgttggccaggctggtctcaaactcctgacctcaggtgatcctcctgcctcggtctcccaaagtgctgagattacaggcgtgaggcaccgtgcccggcagtgagaacatttacaatcacatattgtgtagcatcaggaaggatttttaagatcaaagttagcacattagaagtggaaataatttaaaagtggccttgattttttttttttttttttttttttgcctactgtaaagtcaagcctcagtaacattctgatttcaggatgcagggtggctttgggggatatccaagttgagtggtaaactttgtaggcactactcttgtttccatgttcctggcacctaagttgatatattttctcacagtcttgtgacaatctttgaagtatagttgttatcccattttcctataaggagaccaaggttgagcatggttgtgattgccgaaagtcatatccgtggttttatagacagtcagaatttagaccatgaggtttgttttacctgtggacttagttttcaacatatttaagatatatctgtagtctgggcgcggtggcttatgcctgtaatcccagcacattgtgaggctgaggtgggcagatcatttgaagtcaggagttcgagggcagcctggccaagatggtgaaatcccgtctctactaaaaaacacaaaaattagccaggcatggtggcacatgcctgtagtcccagctacttgggaggctgaggtgagagaatctcttgaacctaggaggcaaggttgcagtgagccgagatcgtgccactgcactccagcctgggcaacagaacgagactctgtctcaaaataaaataaataaaatatctctaaactaatatatctcattaaatttcagatctggagttctgtgagttagggaaacaggatcaccaccatagtagaaaaaactctggtgcagatagttttagacacaaagattatctgaattcaggcccagataattgtcttctttttccccaagaaacatttgaattgtatttctgttagataagcatcatagtaaaaagtcttcaaagtttttgaaggcagaaaaagttttctttgttaaacccttcccatttttttgtcttctaaatttctaggagaactactgttaagttttttagtatcttgttgaacaatggttaacaattataatcatttgtgtttatgtaatcaaactgtgaaacaccggttgggaacttgcttgtgtacacttgatggcgtaaatggtaggggaagagcatacatacaaaagtggcctcttttgctttcttggcagcatgatgttatattcctttggatgtaccgtcatctatgaccagtctcatcttgaaaggcatgcttattttccatttttcccagtgcttggaatttgtttccaaaattgtttctaggaacatgactaatgtgactgacgatgccttaggaattcctagtggggacaaggtgcttggctgggatgcatacctaagaatatctcacaaagaaacctgattttgtttcactattgcctaatggcgcacatagtaggtgctcaataaataaatattttttgcatgagtggtttttgcttgtctggtcatttgccctattgtagagggagagtagtgtgcccactggagtccccacagggtccttttgcctgcatgcctacccctgtggcacccatcaggcttttgattccaatgttgccctgggctctcactcacaggtagatgttttttattgccccattcacaattcagccacctgctgtccgcatgcatgtgcttgccatgtttagatattgggtgtttttccagtttacttaataagttagtggccagactgtacgcttcctgctgcatttttccactgtcttgagagttggcctcgccatctgtgagcaaaaggtctcttctttttattattctcccatggcatgttgcaaaacagtaagcgtgagctggtttcctgtggcaaaaaaatgactttgatttgttctttttgaggttactgtgagtttatcataacaggagtgctaaaaataccgagtctggtatggaaacagcattcacttaccagcatgaacaataacatacaggtttagcctagagcaggaagaaatggacttcatctcaagatgagaatacttatcagagaattcttggcaatcttaacttgctcagtctctgttctgatgagttatggaaaagtacttagaccatctttgagccacagaattgaagctgaaaatattcttagaccaaacattttgtgagcacctgctatgtaccagatctcatagctgggactaatcagaggaagaggaatagaataagtgttcttgccaatgtgaaagacaaacaaataattctactccttgtgaggacagctataacagagggctatagaaactatcatgtgttgttcctggtttttgtttgttttttttcccccccaaaacagggtcttgctctgctttccaggctggagtgtggtggcacaatcataactcactatagccttgaactcctgggctcaagttatcctctcacctcgacctgcaaagtagctgggactacaggcgtgtgccaccatgtccagctattttaaaaaatctgtttgtacagattggggcagggaggtcttgctatgttgcccaggctggccttgaactcctggcctcaagaaatcctctcacctcagtttcccaaagagggactataggaaagcaccaccctgcctggctcgttgttctgtttttaaatacatttgcattattccataataatcaaagtaatttattatgggaacttaggaaactgaaggtctgaccatctttggggagttgtgaagtcttgacagaggaggggagatctgagctgtatttctcggaacaggtatttgccaggtgggaaagagggaagaatattgcagagcaacacatgcacagggccagcaggatagaggctgagcctcggaggggactggagcttggagagagcaggctagtggtttccctattgatagaatatcagaatctggccaggcgcggtggctcacgcctgtaatcccagcactttgagagactgaggtgggcagatcatgaggtcaagagatcgagaccatcctggccaacatagtgaaaccccatctctactaaaaatacaaaaattagctgggcatggtggtgtgcgcctgtagtcccagctactcgggagggggaggcaggagaatcgcttgaaaacctggaaggcagaggttgcagtgagctgaggtcgcgccactgcactccagcctgacgacagggcaagactccatctccaaaaaaaaaaaagaaatctatctatctatcagtcagaatcactgaggaaaccgttgaaaaatgcggagtgcctgcttgtagctcacattactgaatccagatagctaggagtgacttgcatgtctgcatttttctatagcacccaggtttctcaaatcagccaagttaggggaaagtactgtcataggaaagggaagcccatttcccaggtcaaagcctttgcttactcgtttatgtttattttatttttgagacagagtctagctttgttgcccaggctggagttgcaggtgcaatctcagctcattgcaacctccgccttttggattcgtgcaattctcctgcctcagcctccaagtagtggggatcacaggcacacgccaccatgcctggctaatttttgtatttttagtggagacagggtttcgccatgttggccaggctggtctcgaactcttgacctcaagtgatccatgcacctcggccttccaggtgctgagtttataggcatgagccatcgtgcatagcctgcgtttttcttttaaaatgtgttaagcactgtatttcaaattacatttgtgcactgaagcagggaggaaaaaggagctaacccaagtagctgttcaatatagtattttgactgcataccctcaaagtaaagaaaaatctcacctggcgcggtggcttatgcctgtaatcccagcactttgggaggctgaggtgggtggctcacagggtcaggagatcgagaccatcctggctgacacggtgaaacctcgtctctactaaaaatacaaaaattagccgggcgtggtggcgggcgtctgtagtctcagctacttgggaggctgaggcaggagaatggtgtgaacccgggaggcagagcttgcagtgagccgagatctcaccactgcactccagcatgggcgacagaacaaggctctgtctccaaaaaaaaaaaaaaaagaaagaaaaatctctagccggtcgcgatggctcacgcctgtaatcctagcactttgggaggctgaagcaggtggattgcctgagctcagaagtttgagaccagcctgggcaacatggtgaaaccctgtctctactaaagtacaaaaaaattagccagacatggtggcacactcctataatcctagctacttgggaggctgaggcaggagaattgcttgaaccctggaggcagaggttgcagtgagccgaggttgctccattgcactccagcctgggtgacagagcatcttaagaaaaaaaaaaaaagaaaaactctaaataaatattgaactctgcttagtagggattttgttttcagatgaggtcttgctctgtaccccaggctggagtgcagtgtcacgatcataacttactgcagcttctccctcccagctcaagcaatcctcacatcacagcctcccaagtagctgggattataggcaagtagcagggattacaggcatgcaataccacacccagctgattttggtattatttgtagagacggggtttcactgtgttgcccagggtagtctctgtctcctgggctgaagtgagcctcctgcccaaagtgttgggattacaggtgtgagccactttgcctggcctagtaggtttgtttttcacagtgataggggttagcaattctgaaactacttactgttcttctaagattgagcagataggtaagtatagtgttaatagtgagaatcaagttttcttattgtcagaaaagggtgttcctatgaatgtggacagtgggaaaggctagaaggagccatgtggtattggattggaattgaagttatctggatgaactcatggtttcttatacgtagatgtagtaatagatgtatgtgtgtatgcatatccacttttacacgtgtttatttcctagaattgtttcctagaattgttgagagggtttatgcccagagacatcccagaagcactgaacgcactcatgccaagatgttaatacctttcctcactaaagagaaaccagggttccttggagaaatggctgtttccagatctggggtaggaaaattacaggtgagcttggaatatcctgctatgccagaaagtaaggaagtgctctaagaatgataggggcatgtcaaaagaacaagaagaataatcaattaatgtaaacaaggaattatgaagataacaaagtctatctttgactatcaccatagtagtaacaattgtttcaatcaagaatcaaagtgctaaaatcaatggggaacagtttgcggtgaaacagtgtagatgtttccttatcagatgcttttatgctatgcctggtggctcacccctataaatcccaagaggctgaggcaaattgatcacttgcacccaggagttttgagaccagcctgggcaacaaaacgagaccccatctctacaaaaaataaaaaagttagccagatacagtggtgcatgcatgtagtcctagctactcaggaggatgagatgggaggatcggttgagcgcaggaggtcgaagctgcagtgagttgtgattgcaccactgcactccagcctgggagcaagactttgtctcccccgaaaaagaagatgcttttaaatgaattacatagagagacattggagaaccctggcaggttgtacctcagctgagtgatgaaattaacaatctagggatggacagttagacctcatgcctcttggaatatgtaaccctgggttggatctgagaatagaggaaggttttttttcttttgctctaaaggatgttagtggaacaattggtaaaaagaggccccggcgtggtggctcacgcctataatcccagcactttgggaagccgaggcaggtggatcacctgaggtcgggagttcgagaccagcctgcccaacatggagaaaccccatctctactaaaaatacaaaattagccaggcgtggtggtgcatgcctgtaatcccagctacttgggaagctgaggcaggagaatcgcttgaacccaggaggcggaggttgtggtgagccgagatcgcgccattgcactccagcttgggcaacaagagcgaaactctatctcaaaatagtaataataataataaaataaaaaacaaataaaaaggtctgtaggttagatagcagtactgtttccatgttatttatttttacagttatgataattgtctcatggttatttaagagaatggtttttgttttgtttttcttgttttttcttttccttttttttttttttttttttgagatggagtctcactctgtcgcccatgctggagtgcagtggcatcatctcggctcactgcaagctccacctcataggtttacgccattctcctgcctccccctcccaggtagctgggactacaggtgcccgccaccacacctggctaatttttgtatttttggtagagatggggtttcgccatgttagccaggctggtctcgaactcctagcctcaggtgatcctcccacctcagcctcctgaagtgctgggattataagtgtgagccagtgcacctggcctctttttttttttttttttttttaattttacagaattttttttttttttaagacagagtcttgctctaaggctgtagtgcagtggtatgatcacagcttgctgcagcctcagcctcctggactcaagcgatcctcccacatcacccttctgagtaggtgggattattgtaggctaaatttttaattttattgtagagaggcctcactccatggcctaggctggtcttgaactcctgggctcaagtgatcctcccacttctgcctcccaaagcattgggataacagacgtgagccactgcacccagcctgttagataatttagaaaattttctttcctcattcttcaatttcccctcattcacactcccaactttcctgttttgtgatttttaaatgacgttgtctttggatgccggctggatttggtgattagttctcttcagaagaaacttcttattttagaacttgtaacctttgcaaagcaggccataggcagccatcgctatttgggtatgacattccccagtgggtttttggtgtccagtaatgacaaaaactgctgagaaagagacagccacagggaaatgggttccgataatggggcagcagctgagtgcttgttgatttgctgctgtcatgaccacagatgtttaaaaataatttgtaaggaaaaagaaaaaagcgtagtgtgtgtgtgtgtgtgtgtgtgtgtgtgtgtgcgcgcacgcacgcgcgcgcgcacaccactgccttatcagtggtagagaatgcagaccacagtcattcagaaaggaagaaggcaccaccatggaaacaggagaggtgaggagaagggcagaggtgacccacaaatgcggctcagtgccttacagcagagagctcatgagagaacagaactggttagtcaccgactctgctcctcggtctgcaagagaggttcagcaccaagtctatactacacagtactggaaggattagatgaaggcctggcacacattgtgaattaatagttactggttacaggcggggtgtggtggctcaggcttgtaatcccagccctttgggaggccaaagtgggaggattgcttgaggccaatagtccaagaccaacatgggcaacatagcaacaccctgtctctttttttgactgtttttttgaaacagtctcgttctgtcagccaggctggagtgcagtggcacaatcttggctcactgcaacctctgcctcccaggttcaagcaattctcctgcctctgcctcccgagtagctgggattacaggtgcctaccaccacgtccggctaatttttgtatttttagtggagatgggctttcaccatgttggccaggctggtctcaaactcttgacctcaggtgatccacccaccttggcctcccaaagtgctgggattacaggcgtgagccactgtgcctgaccggttcacgtactttacatgcattgtgatcatattaaatcttcatgacagccttactagatcaggtcttgtcctgttttcacatgaggaaattgaatcttggaagggctaagtcatttgtccagggtcatcacacgcagtaagtgttagagtctaaacgagccagagctgtcacactgtcatccccagggccttgtgtttaagcatcgcccaacaaagtgctcagtcagactttaattattagcattactaataataccattatgatgattattttgtctaaacttcacaggcacctcgtgacattttcttattccacttttgcagatgggaaactgaggcccaccaagatcagattacaataatgggcaacattgtcagcaacctgccttgctttttttcttagcaggcccacatctcccccactcccccacccacttggcagtagcctgtgtttgagctgctcacaggccccaaggcccagctgcaattcttgtttaaagcctcacatcttttctctgactgtcagacaacagtcacgggaatgtcctgtgccatcttccctcggcaagaggggttggcagagagcagcagatgcctagagtcaaggtcatgtgctgctcaagtgctgggctggagacaagaccctctctccctgctgcttgtgaccaggcagggtggctctgaatgtagagggctctgtcagaacagttctgtgaccagagggtgtggttggcaaagcaatgcattaggggcccatggaagtttattcttgttgtccacattatttccctgtgacttttagatttttttttcctttttgtaaattagttttttcatactagttagaatgtttcaccttaaaggtgagagtcaagctctggaatcgcctgacatttttaaggaaaggaatagaatattgggctggggctagtctgaaatggtggtttgtattattttaaattgatgggctctgggttaggggagccaaatccattttaaagtgatttttgtaaaaattggcatgtcttctgtttcttctcttttccaaaggtgacactataacgtagaggttaagaatgtggtgacttttaaatccgtcgtgaccataagcctctcctaagccccagttttcctaccactaaaatgggggtggtaacagttgtacctacctcattctgtcttttttgttttttgcttgtttgtttgttttttagatggagtcttgctcttgtcgcccaggctggagtgcaatggtgtgattttggctcattgcaacctccacctcctgggttcaagcgattctcctgcctcaacttcccgagtagctgggatgacaggcacccgccaccatgcccatttagtttttgtatttttagtagagatggggtttcaccacgttggccaggctactcttgaactcctgacctcaggtgatccacccacctcagcctcccaaagtgctgggattacaggcgtgagccaccactgccggcctcgttctgtcgtatttttttacgtaggagagctcagtctgaatgtaggatatgacatggttgtggggttttttttgtttttgttttgtttttgttttgttttgttttgttttgttttgttttgttttgtttttgagacagtctcactctgtcccccaggctggagtgcagtggtgtgatagctcactgaaacctctacctcccaagttcaagcgattctcctgcctcagcccccaagtagctggaattacaggtgcccaccaccatgcccagctaatttttgtagttttagtagagatgaggtttcaccatgttggccaggctgctctcgaactcctgacctcgggtgatccacccgcctcggccttccaagtactgggattataggcgtacttggaaggtaccatgcccggccattatatgctttttaaaaaaacctaaatgttgcaaaaaacatgtgtctaaaatctctgtttcaacatagttttttaatagccatgtaatattccattctgtcaatatgtctttatatgtggtacagactgagtgtctaaatccaagaacccaaaatctgaatttttttttatttttcatttttatttgtttacttatttttgagacagagtcttgctctgtcacccaggttggagtgcggtggtgtgtcggctcactgcgacctccacctcccaggttcaagtgattttcctgcctcagcttcccaagtagctgggattacaggtgcccgccaccatgcctggctaattttttgtatttttagtggacacgaggtttcaccgtgttggccaggctgatcctgaactcctgacctcaagtaatcctcccacctctgtctaccaaagtgctgggattacaggctgagctactgcgcccagcctatttttgtttttttgagacagagtctcactgtgtctcccaggctagagtacagtagccccatctctgctcactgcaacctccgcctcctgggttcaagtgattctcctgccttagtctcctgagtacctgggattacagacgtgtgccaccacacccggctaatttttgtatttttagtagagacagggtttcactatgttggccagcctgatcttgaactactgacctcaagtgatccacccatctcagcctcccaaagtgctgggattacaggcatgagccaccgcaccaagcccccaaaatctgaaatgttttgagtgccgacataacactcaaaaaaatgcttattggccccgggcgtggtggctcatgcctgtaatcccagcactttgggaggcctaggtgggtggatcacctgaggtcaggagttcaagaccagcctggctaacatggtgaaaccccgtctctactaaaaatacaaaaattgaccaggtgtagtggtgggtgcctgtagtcccagctactagggaggctgaagcaggagaatcacttgaacccaggaggcacagcttgcggtgagccgagatcccgccactgcattccagcctgggcaacagagagagactctgtctcaaaaataaaaataaaaaaaaaataataaaagctcattggagcattttggatttgggattcttagatttggggtgctctattggtaagtacaatgcaaatatttcaaaatctgaaaatacccaaaattcaaacacttctgctccctgacatcctgtgtaaacaacactgcagtgaacatttataggtaattcattcagcgggtaagggtcaggaccttttatagggatccttaataccacatttttacatggttcattgagcattcgtgctcccctctgctgtgggtgagggtgcaggtccctcagccttcttgcttgggttgagtcatcctggtctttaatttggtaagcaaaaaatggcatcttgtttttgagctcgtttctgagaaagtgcatgctccttttccccatcaacaactttcatccggcgcctcggaacctcttcagtagagagtgagatgcaaatagcgaggcacagcttctttccctcttctgagctgatgcctggtgaggtcatagactgggtttcattgcaaagacgaaagcgtgggcaggacttttggagcacaaaaaggggcatttcagagtagtcttcatgggcggccactccagaggtgaagttttctagagaaagacatgaaagtactgtgtggctgtggcgacagacagaggcttacgagcctgccctctagagactgtgagctccgcgtgtgagggcaaggcctggggctgtctgggtcgcttctgggtccccaccacagctagcatagggtaggggtggagggggggtgctcaggaagtgatttttgaagagtggatgactgaatacatgcacacacatacttttaagtttctgggttaaagaggaaaacagaatgaggtaaacaaaggaaagtaatgtggaggtgaactgagcagatggcaagatgccgtgaatggttagaggccaggagagccagaatcagagtggcttccgtgaagtgtccctacctcctcccccagcccagctatgtcactcctctgagcttcacacctatggactgttctgcaccctagccctcagatgcaacggtgaaagtgggactcctattgggtttccctgttgaggacagacatggtgccctgtgtatctgctgctgcttttttctttttttcttgctgagtattccatgtgtagcatgtttgtaacacttgataagaaacagaaccatcccagatagcttgaacacttttcaattcagtcagtaacagaccaggtctgctttggatttccaggagcttgtgtcactttattttttttctgagccagggtctcgctttgtcacccagctggagtgcagtggtgcaatgtcagctcaccacagcctctgcctcctgggttcaagcaattctcgtacctcagcctcccaagtagctgggactacaggtgcctgccacaacacccggctcatttttgtgtttttagcagagacggggtttcaccatgttggccaggctggtctcaaactcctgacctcagttgatctgcttgccttggcctctcaaagtgctgggattacaggcgtgagccactgcacccggcctctggattgcccggcctgtgtcactttgtcatgagcccttctcccctagttatcctttattcttcaaacaggcttcctgtgtgacatattttttgagtgcctgctatggggcaagccctgtgccaggtgttcagtatagagtagtgacatcgcctttgccccacagagcataaaaatctaatggaggagacaagccagtccttgtgctagttcatttccacaggtgaatataaaaccacaaactgggcagggcatggtggctcacgcctgtaatcccagcactttcagaggacaaggcaggtggacaacttgagctcaggagtttgagaccagcctgggcaacatggtgagacctcgtctctacaaaaaataaaaaatgaaccaccaggcatggtggtgcatgcctgtagtcccagctatttgggaggctgaggcaggaggatcacttgagttcaggaggtccaggcagcaatgagctgagattgtgctgctcattccagcctgggtgacagactgaggccatgtctcaaaaaaaaaaaagaaaaaaataatcacaaactgtgagtaaggtatctaagggaaaaaactgtgctgggagtgaatgtcaggagacagggagatctgaggcagtatcgtgtccagagcccacagctgaattaatggtaatgcaggtaaatgagctactgtgtgacacaggttaccacagcaagtgtatcggcttttctagggcgagtgtgagctgggtttctggactttgcttaagagcagtgacagacctggaagatactgccccaggcactcttgggtgctttacatgtattggttcatttaatctttaaaccccacaagtgcccttgggattcccattttgcagaggaggctcagggtccttgtcacttgcccaaggtcacagtaagtggaagaatagggagtctagagctgtgctcttcgctgctgccctccagttggaaagctgtccaggccagggacaggctttgcagagagaaggtacagaggacgggacaggcaaatattcagagactatgaggactgaggtggttctgccaactgtggagggcctggtcacttgacaaggcacctcattgcacccccctgaggctctctcaaagccccttttcgagttaggacattgttatctcctgtgtagtttttgttgattgccctctgaaatgctgtgagagggtagaccatccattctgccctcgcctgcccagcccagcacctggcacagtcattgctcagtgtatatttattgaatgaacaattgactgaatgtcaggcccagggctttgccttaggaaacaggctgttggataagaggtagtactaccatactttgcaatttttctggaaatttatgtcacctgggagtggagcagattaccaggctgtttccagagatagcgactctccataaagtgagccaacctgggggctgggcgcagtggctcacgcctgtaaccccagcgctttgggaggctgaggcaggcggatcacgaggtcaggaatttgagaccagcctgaccaacatggtgaaaccccatctctactaaaaaatatgtatataaatgagccgggcgtagtggtgcgtgcctgtaatcccagctactcaggaggctgaggcagtagaatcgcttgcacctgggaggcggaggttgcagtgagcaaagatcgcgccactgcactccagcctgggtgacagagcgagactctgtcttaaaacgaacaaacaaaaaaaacaaaagtgagccaaccctggggaggagtctacgttcagctgcagggagccagggaattggggccgaggtgtctggcacagaaaagctttgggcctgtctcaggtaaatgaagttttgatatagattcaactcccctgccccccacaattgaactgtttttgggggccagcaattaggggctaatttgtgacagtgactttattttcttcctactaaagtactggtttattcggtggccttggtgattagatttaggcataatagttaaatgtaatagaagtttatgtaacaaacagtgattaataatgttgctgtccagattcccgttatagcgctaacctgatgttatgaactgagattaaatttgaatttgagtgcttacattattttgtaaaggtggttgtatattcacatatccacagttttttctataaataacgtgaaaccgtgcttggtttctcttttccaaagtttgccttttccattacatgggcaagtcctgaacctaagccgagacactagtccatcatctccagcaatgaatgtcatccccccagacttcagcatcctgagttaattaaaaggtgcagatgaagttaatcaagtttggaactctaattttgtgcagtgttttgatacgatttgatgagtcatcttttggtagagcacctctctatccctgacagtgtttgatcttaacggaacagttttataatgtgtaaactggtgggaggtgctcttcagaaatgcagtcaacagtggtatgtgtgcgtgtttggctcttggggcggggcggaaagcagaacaaaggagaatttaataagcgagaacttgtcaggggctagggtcagttctgaggctgctgcctgtcaagaacatggctttcttcctgcccccctccactgctgctaactggagtctgaccttcgagaaagagtgaaaaaagacagcttctgtttgttttgctgcaagtaagtggctggactgattggcccccttcccagaggccctgcaaggacttcagatgtggtcagcgaggtatgtggatggtgccagcctgccggccctcgtccagccaaactgcaccaggaacaggcaagggtcccagagaaacagcggggtcagctgctgccgcctttgctcctgctcttaatgctgtcctatttcttcctaagaggaagctggtttactctctcaagattgatgggcaaagttttatatgaccacggtctccacttctcacccactgaacttacagcttgaaattaacagaggcgaggcccatctggaaaaatgcatttgacaaaaacttgatcaaatgggggatcccctgaggtgggtggcaaagaaccagaccacttggaatcctaggtgctgtgtccctgtatggacctgctgtttcttttggattccattagggttaagaagcacaaattctgaagctagatttgagtttacatttctgctccagtacttgggagttacagtgaccaagtcatttaatgtttctgaacttcagtttcctgatctgtaaagtaggatgggtaggttgggcgtagtgggtcatgcctataatcccagcactttgggaggctgaggcaggaggatcacttaaggtcagaagttcgagaccagcctggccaacatagtgaagccccgtcactagtaaaaatacaaaagttatttgggcgtggttgtgggcgtctccagcctgggtgacagagtgagactccatctcaaaaaaaaagaagaaaaacaaaaacaagtaaataaatgaataaaaataaaggaatccagccatctgttagtatagccaaagcagaggatattgcatcaaatgttaaacgctagtcctgtcagtcactcctgagagaacagggcaacaagacccagaaagggtatcaacactgcctgagcagatggaggcaaagctgtgcatgggctgcttatagggcacagtctgaggccttgcagcagtcacgtggaaactgaggctgcctgctttccaggtgcaaggtgatggacagtggcaggaaccctgtgctagatgactcttgtgcgatcttatttctttgttactgggacacaagcaccaactgtcacaagggaccaacaagaggaggtgattttttttttcagctgttaccacaaagcttttcatcttttggtttgaaaacatagctgtgggaataggccgggcgcggtggctcacacctgtaatcccagcactttgggaggccaaggcgggccgatcacaaggtcaggagatcgagaccatcctggctaacacggtgaaaccccgtctatactaaaaatacaaaaattagccgggcgtggtgatggccgcctgtagtcccagctactcgggaggctgaggcaggagaatggcgtgaacccgggaggcggagcttgcagtgagccgagatcgcgccaccgcactccagcctgggcaacagagcgagactctgtctcaaaaaaaaaaaaagaaaaaagagagagaaagaaaatatagctttgggagcaccaaagcccaaagcgttatagtgcctactatgtgtcaggcactatactaaacatttcacatggcttagcactcatgtgatcttcacgataacctggtgagcgggtaattattatcacccttcctactggtttgttgttgttgttgttgtcgtcgttgttgttttgagacagagtctcgctctgtcacccaggctagattgcagtggcacgataccggctcactgcaacctctgcctcctgggtttgagcgactcctgcctcaggctcccgagtagctgggattaaaagcgtccgccaccatgcccagctaatttttgtatttttaatagagatggggttttatcatcttggccaggctggtcttgaacccctgacctcgtgatccacccgccttggcctcccaaagtgctgggattacaggcatcagccaccatgcccggctacttaatttattttttgagacagcctctctctgtagcccagactggagtgcagcggtgtgatttcggctcaccgcaacctctgaatcctgggttcaagcaattctactgcctcagcctcccaagtacttgattataggcacccaccacactttcggctaattttcctatttttagtagagatggggtttcaccatgttggccaggctggtctcaaactcctgacctcaagtgatctgcccaccttagcctcccaaagtgctggggttacaggtgtgagccactgcacctggcctcctttattttatgggacattttttgaaaagaggcttggtccaaacaggcagtacttgccacttctgcagtcatttctctaccctgccccaaaatggttactcagttgcatttatttactacaatcggaataccagcaggacatctacaaaagtagaagtattgggtggtagcagatcagtgctctctggcatccagatcgtctagatggtcacagcctttttttttttttttttggagacagagtcttgctctgtcgcccaggctggagtgcagtggcacaatctcggctcactgcaacctccacctcccgggttcaagagattctcctgcctcagcctcccgagtagctgagattacaggcacccaccaccatgcacggctaatttttttggtatttttagtagagatggggtttcgctgtgttggccaggctggtcttgaactcctgacctcaggtgatccacctgcctcagcctctgaaagtgctgggattacaggcatgagccaccacacctggccaattgttacagctttgagttgactgccaagtgttgaggtagcattgagggttgcagaagctgtgttcttgaaaaagagaagagagtaacattctcagaaagcaaacagtattcagaagagtcaatgggtgttctggagcttttttcttttctttcctttttttttttaaagaaattaccagctgggtgctgtggctcacgcctgtaattccagcactttggggggccaaggtgggaggatcacctgaggtcaggaacttgagaccaggaatttttctatttttagtgaaaccccatctctactaaaaatacaaaaaattagctgggtgtggctgcaggcacctgtaatccccagttacttggcaggttgaggcaggagaatggcttgaacccgggaggtggaggttgcattgagccgagatcacgccattgcactccagcctgggcaacagagcaagattgtctcaaaaaaaaaaaaaaagaaagaaaagaaaaagaaaaagaaattacctcttctctgatatgcagagccccgtctatactggacaggtggaagttaccagagaaatacaggccaggggcctttgtctgacattggcactgagaaaagcatagcccagaagcagggtgtgtcttttttttttacctgggcatctgtggtttgagatcttcttggaacactttataacccatttctgaacgtctcccaggcttcagtggagccacctgttgtagcttctaaaactgtgtcctcctcagttgttctcccacccattgccttcacagatgcagagaccaagattcactcactcgccattggacctttagcacccaggtctgtctggcacaaagtaagtgccaggctggtggagtgaatgaattctacttagagaatggccctcaacacaggctgctcattaccaaaactatttggtctttaaaaagtgtgactctgatgcttcagtctggggtgggtaccaaatacttgtattttttaaagagcctcacagcaacttgaatttaccttaatttttatgtaggaacccttgtcctggtagagagtataatttgctgaataagtctactttttcaatcaacatatacggaagagatatcaatgaaagaactgacaaactgtaaagccccctctccaggtgtaaagcactcagggcttgggcctagaagctgatccatgtctctgtgtctgttctgaaatagcctgtgtgatgtgggagaaagagtattgtccttagagacaaggctcgagactggctgtgccctttccttgggcagtatgtagggaacaagaatgcctgcccgcccgcaggcaggttacctgtggacaaggtgtagtgggcagttagaaggtgttggtatgttaatcagtcttttttttttttttttttttgagatggagttacgctctatcgcacaggcaaagtgcagtggcgcgatctcagctcactgcaacctcccaggttcaagtgattcttctgcttcagcctcccaagtacctgggactacaggcgtgcgccaccacgcctggctaatttatgtatttttttagtagagacggggtttcaccatgttggccaggctggtctctaacttctgacctcgtgatctgcctgcctcggcctcccaaagtgctgggattacagacgttacagacgtgagccaccacacctggccagtctttttttttttttttctgagatgaagtctcactctgttgcccaggctggagttcagtggcacgatctcggctcactgcaacctctgcctcccgggttcaagcgattctcctgcctcagcctcctgactaagtgggactacaggtgcctgccaccacgcctggctaatttttgtatttttagtagagaccgggtttcaccatgttggccaggttggtctcgaactcctgacctcagatgatccacccgccttggcctcccaaaatgcttggattacaggcgtgagccactgcacccagcctaattagtcttttgctcctatttgtctttatttgggataaaagttatagccttgttggggtcttcttacacagtagttctgactcacagccatcatctgaacctttcctctggttcacaaccaaaattaaacatccatttatggggattgagatagttttcatagtaaaggaagttttgtttgtaatgaccttcctgtttgatgggtctaagtatatggctggcccttctggctaaagcaggctttaaactggtcctgcctagaatgtgtacctcccactccttatcatctctcttctaggtcccttcccctttccctttcccttccccttccccttcgcttcttccttccctttgttccttttcctttcctttttttcttctttttttttttttttttttgacagggtctcactctgtcacccaggctggagtgcagtgatgagatctctgctcatgtagccttgaccttctgggctcaagtgatcttctgccttggcctccttagtagctgggactacaggcaccaccatacttggctaaattttttttttttttttggtagcagtgaggtctcactatgttgcccaggattatctcaaactcctgggctcaagcgatcctcacgccttggccccccaaagtgttgggattgcagatgtgtgccatcacactctgcctcttccgggtctttttttttttttttttcccagacggagtctcgctctgttgcccaggctggagtgcagtggcacgatcttggctcactgcaacctctgcctcctgggttcaagcgattctcctgcctcagccttccgagtagctgggattataggtgcctggctaattttttttatatttttagtagagacggggtttcaccatgttggtcaggctggtctcaaactcctgacctcgtgatcctcccacctcggcctcccaaagtgctgggattacaggcgtgagccaccgcgcctggcttttttttttttttttttttttttttttttttttaattttacttttttgagacggagtctcactctgtcacccaggctagattgcagtggcacaatcttggttcactgcaacttccgcctgctggattcaagtgattctcctgcttcagtctcccaagtagctgggactacaggcacgtgtcaccacacctggctaatttttgtatttttagtagagacagggtttcactatgttggccaggctggtctcgaactcctgaccttgtgatccacctgcctcggcctcccaaagtgctggggttacagctgtgagccaccgcacccggctcttccaggtcttaatagagcctttttcctctactgaaagcttccactgctttctgcccccttcaaactcatatatacttcattgaattgtttcctcggggaagccttcctgataccaccctacagagggtgtcagacgccctattatgctgtcacagcacttttcacagtaaggtaaattgcttttataattattggattgcctctctgactatgtttgttgaataaataaaaaaaggtggccaggtgccgtggctcacacctgtaatcccagcactttgggaggccgaggcgggcggatcacgaggtcaggagtttgagacaagcctgaccaacatggtgaaaacccgtctctactaaatatacaaaaattagccaggcatggtggttcgtgcctgtagtcctagctactcaggaggctgaggcagaagaatcacttgaacccgggaggcagaggttgcagtgagccaagattgtgccattgcactccagcctgggcgacagtgtgagcctccatctccaaaaaaaaaaaaaagtggctttataacctgccttctttttcttattcccagtgctcttaaagttccgtacagataaaggaagagatcccagttctgatacatatgaggaagattctgagttgttgctccagatacgaaatgatgtgcttgactcactgggtattagtcctgacctgcttcctgaggactttgtcaggttggtgtcagtatttatcactgtttagtctggacagataaagtttgttttcaggatttgccttaatttgacaagctcttttattagaaacccttcagagagcaccctgccacattctgctcgctcctgtagacttctgcctctccactagaatagcaatatataaaaaataaagaggggacagattctgatttttacaataagtatcttatattcacgtggttcaaaattcaaggcaatgtaagatctgtaaacattattctctaccttttttcactttatgtgatcttgttatctcttggggacatctccagatcagtacatagtttgctccctcttttccacagctccttagtattctagagtgtgaagcgatggagtttattgaaccagttgcctgctcactcaagttgtgttcaggcttttctaactgcgtaacactgcagtgtgtgaccttgtgtcgtacgtgtgcaggtacaactgcaggataattaggaggaagggagttgctgggtcagaaggttgtaatttatcatttggtcagcattgccaccttgcctccattggtatcctatcaattcatacccccagcagcaaaaccacccatgttcccagcatcctctcacttggacactccatgctttcaccttacgtgactacctttttgctctcataaacaggcttaggatttgattggagaagaccacatagtgactaggtcacaatctctctctctcttttttttttttgagacagagttttgctcttgttgcccaggctggagtgcaatggcacaatctcaactcaccgcaacttctgccgcctgggtccaagcgattctcctaactcagccttttgagtagctgggattacaggtgcctgccaccacgcccagctaattttttttgtatttttagtagagatggggttttccatgttggccaggcaggtcttgaactcttgacctcaggtgatccgcctaccttggcctcccaaagtgctgagattacaggcatgagccaccacgcgctccatccacatctccttccaagcagctctgggatcatgtacacaccctaattccctttccatgtcttgagaggcttcctaaactcggctttgcagtgcctccagcttgtagcagtgataatgatggctgcagtttactgagcagctgttatgtactaggcatcaggtagtaagtagccaacccagatcccaccccaggtatcattacagtgcttgctctagtagcagcatgctaccttggtttcttatcaacagtaaggtctgccagagtccctagtcctttctttgttgacttcctgctgggaacttcaggtgagcaacagcaaaccccactccatttagggccagcagtggtctttgaagcacctgtggtgccctgacccaaaaagccatgattgtcctggtacagtggctcacacctataatcccagcactttgggaggttgaggcaggcagattgctttgagcttaggagtttgaggccaaccttgacaacatggtgaaaccctgtctctacaaaaaatagaaaaattaactgggcatcgatgactggtgcttgtagtctcagctactctggaggctgaggctagagcatcgcttgagcccaggaaagcagaggttgcagtgaaccaagattgcaccactgcattccagcctgggtgacagagagagaccgtgtctcaatacatatagcgtaaggctgggcgcggtggctcacgcctgtaatcccagcactttgggaggccgagacaggcagatcatgaggtcaggagattgagaccatcgtggctaacatggtgaaaccccatctctactaaaaatacaaaaaattagccaggtgtggtggtgggtgcctaagtcccagctactcgggaggctgaggcaggagaatggcgtgaacccgggaggcagaggttgcagtgagctgagatcacgccactgcactccagcctgggcgacagagcgagagggagactccttctcaaaaaaaaaaaaaaaaaaaaaaaggcagcaatagagtggcagtgcctgagcacacgagactgagacatggaaaagcggtttccccaaagagggtgggcagggaaggaaccactttggagagaaaaccagccagcagctcgttaggctgtggctttcctcttctaggaagcagggccttcaactctgctggccggtgatgcagagccagaccgttcatcactttgaatgcccaagtagtcacttggctgcacactcacggcccagcacacagccccaggtatgctcagtggctgccgcttgccactggctgactggctgggattattggaactgaagccctgcatgacccagtccttcttcctgctgcgaagcacagcagaggaaacacttgcttctcacaaactggtcattcctccaccaagagatgagtgccccagtgagttaccatgagatccaagcctgtacagtgtcatcagccgctgacctcacggtgctgatgttacaaaggcaccttgtaaactgctgcctatgtttagatgatggctttttttttttttggagacagagtctcgctctgtcccccaggctggagtgcgatggcatgatcttggctcactgcaagttccgcctcccgggttcacgccattctcctgcctcagcctccccagtagctgggataacaggcgcccgccaccacgcccagctaattttttttgtattttttagtagagatgtggtttcgctgtgttagccaggatggtcttgatctcctgacctcatgatccacctgcctcggcctcccaaagtgttgggattacaagtgtgagccaccacgcccagcctctttttttttttttttttaagatagggtctctctctgttgcctaggctagagtgcagtggcacatcatagctcactgcagcatcaacctcctgggctcaggcaacactctcatctcggcctcttgcgtagctgggactataggcgtgtactaccaagcctgcctaattttttttttttttttttttttttgtattgacagggtctcactatgttcaccaggctgtttcctattttttaaagttatgaaccgcataacaagagagtatacaaagcacatctgcctgagttaaatgataattaatacttatttatttttgttgtagagacgggggtctcactctgctgcccaggctgttctcagactcctggattcaagccatccttctgccttggctttccaaaacttctgggatagacaggcgtcagccacttgtatctcttttaatttggaatagcccttggcaaactggcttgccacctctttttgtaaataaagttttattggcacacttactcatttatatattatctgtggcagcttttgtgccacagcagggttaaatagttataacaaagaccatatggcccataaagctgaaaatattttattatctggttcttttgtttgtttgtttgtttttgagacaaagtttcactttgtcacctaggctagagtgcagtggcatgatctcggctcactgcaacctccacctcccgggttcaagtgaatctcctgcctcagcctcctgagtagctgggattacgggcatacgccaccatgcccagctatttttttttatttttttattttttttatttttttttgagatggagtcttactctgtcacccaagctagagtgcaatggcccgatcttggctcactgcaacctccgcctctgtgctctgtggttcaagtgattcttctgtctcaacctcctgagtagctgggactacaggcgcgtgccaccacgcccggctaatttttgtatttttagtagagatggggtttcaccatattggccagactgatctcaaactcctgacctcatgatccacccagcttggcctccgaaagtgctgggattacaggcatgagccactgcacctggcctgttatctggttcctttttttttttttttttttttttttttttgaatcagagtcttgctgtgtcacccaggctggagtgcagtggcgtgatctcggcttattgcaacctctgcctcccagctttaagtgattcttttgcctcagcctctggagtagctgggactataggcacgtgccaccacgcccagctaatttctgtatttttagtagagacggggtttcaccatattggccagactgaactattcctccaatacggccaaaatgagattctaccagcaatgggaggagtttttttaattattattattgggagtctctctctcacccaggctggagtgcagtggcaccatctcggctcactgcaacctccacctcctgggttcatgcaattcttccacctcagcctcccgagtatctggcattacagctgcccgccaccacacccggctaacttttgtattttagtagagacggggtttcactatgtaggtcaagctggtcttgaactcctgacctcaaatgatccacccgccttggcctcccaaagtgctgggattacagatgtgagccaccgcacccagccctagttctccatgtattttagagctctgtagtggaccttgataagcaggaagatgttacccctggatgaacaaaatgggaatgtgctggtcctggccagggcgtaaggagccggaggtgcctttggacacagctcttgggattggaatggatacagccttttgggagggcattttggcaatacatatgaaaaactagcattgctatatttagaaatttgtcttaaggaattatttcgacgcctgtgtctttgtcaagatgtatgattacagtgttgaacagcttaaatgtccctcaataggttatagaacagaagagtaatagttgataatatttgggtttaaaattatacctatttatttatttatttattttttgagacagtcttgccctgtcaccaggctggagtgtagttgtgcgatctcagctcactgcaacctatgcctcccaggttcaagcgattctcctgcctcaacctcctgagtagctgggactacaggctcaccccaccacaccaagctaatttttgtatttttagtagaaacggggtttcaccatgtgggccaggatgatctcgatctcttgactttgtgatccgcccacctcgacctcccaaagtgctgggattacaggcatcagccactgagcccgccctaattatacccgtttagattgtgcacttttaaaaatgtctagaaggggctgggcgcagtggctcacacctgtaatcccagcgctttgggaggccgaggcgggcggatcacgaggtcaagagattgagaccatcctggccaacatggtgaaaccccgtctctactaaaaattcagagtagccgggcgtggtggcgggtgcctgtagtctcagctactcaggaggctgaggcaggaaaatgacatgaatccgggaggcggagcttgcagtaagccaagatcgcgccactgcactccagcctgggtgacagagcgagactccgtctcaaaaaaagtctagaaggatgtgcaccacactggggagattggaggtagttctgtagggaggctttccctttcacttgtctgtgttccagtttgcttggtgagcacacagcattgtgttcaggagtaggagctggcagagcacacttcctttggggaagtggtggaattaagtgatttgcttactaggatgggtaacttggaggggcaggtgactgtgtcatctaaaatttgtcctctagatgccccatcctggcccagaagggctggtttctatgtgggttgtgaagactttttctgccctcatactttaatttcacgcctcaaatttcccttgcttcctacatgttaacacaggcctgctccctgacatttgtctgggaatagcatatagaacccactggccattatgggtaagaagagaattgcgagaatgtgaccagggcactgaaacatctgatatctctaggacagatataggaagcacagatatagtctttcctttaacttataaaggtaaaaataaaagtattgtgaaagaatttctgcttgccaaagttcaaaggtcttttccaaccacttatgaatcccttgctcagatttcattttcacgcctagatgccagcattaacactgctatctgaatcgggccctcctgctagaagttgtttttattcaggagagcctactactgaatttctccagatgtcatggtcacagttctgttcccagtgctccattttccttgtcttcctctcttttaggtactgcttctccgagatggccccagtgtgtgcggtggttggagggattttggcacaggaaattgtgaaggtaaaacatcactgtggagcagaaaattgttaaccatgactttgtatatgtgctgacagagagaatggaaactgtcttagacagctgcctgctttctctcaccccattcatctttgtttcatgccctccccatttccacctcatcccattttctctggcccatccaggtgccattcagcaaatgaccttggagtgcctgctctgtgcttagctcacagttggccatagtgcctcgaaggtgtgatctgctctcccctaactgtattagttatccagtgcctgttgtattggtcagggattctgcttctcatagctctataagtgagtactatcatgatccccacttaagaggaagacacttgggcccatgaaagggactccagaacctgtgctcttaacctctgtacagtttatctctattcatcaccatgacatcaaagccctcccttttttttttttttttttttttttttttgagatggagtctcgctctgtcccccaggctggagtgcagtagcacgatctcagatcactgcaagctccacctcccgggttcacgccattctcctaccttagccttccaagtagctgggactacaggcgcctgccaccacgcccagctaatttttttgtatttttagtagagacagggtttcactgtgttagccaggatggtctggatctcctgacatcgtgatctgcccacctcagcctctcaaagtgctgggattacaggcatgagccactgtacccagccgcaccccccccctttttttttttttttgagacagaatctcactttgtctctcagactggagtgcagtggcatgatcttgactcactgcaacctccgcctcctgggttcaagcgattctcctgcctcagcctcccgagcagctgagagtacaggttcccaccaccacaccaggctaatttttgtatttttagtagttcaccatattggccaggctggtctcgaactcctgaccttgtgatcctcccacctcagcctcccaaagtgctgggattataggtgtgagccaccgcacccggccaagcccccgtctttttaaccacacactgtaggtatttgtagagaaatcagtttctgtgtccccatgaacacaccaggagcccctcaaggctctgtacaggatgacccgtgaccctgttaggtaggtgttagtgtgtctctcagaagggaagcatcttatacagggtcacataaccagtaactagcacagccttttgagggtcttctggaacatttgggttgctaaaactataccatacccccaaatatattgtacattctttgcagactttgctatttgcccgaagatgttaaatttgccttttgcaggttcttggctgccttcgtggactccggtgaggctttttccttctttcttatggagcagagtcgtgcctggttaaatgattggccatgtccatgtacatgtcaagtttgagcttgggaggacagtttggaggccagcccttaacactttgtcttggggtctgtacattctggaggcgtttggctcaatttgttagtcacaccgttttcctaaggctactttttttttttttttttgtctattttttctgatccttctctctggtctaaattcttcctttgatcaaatctaactttcttctatgtaatgggcaccgaggagatatttggagggggaagaaaagtgtgcaatggccatacctctttccttgctcacattttatacatagcccagagtgatgtgaaaattacagtttatatgcccaatctgagaagagggtaatggccacccagaggactgttcgagcaggattctgaggctccctgtagacaaactgcaggaaagagtgcagcaatgggaatgttctaagtggggaatgggaatgtacatatttttgtagcctaaaatgacgacaccaccaataatagacaagacttactgaaagcccactgtctgccacacaaagacagtgttttttacgtggatactcatttcatctcccaccggccctatgaggtaggaactcctgtgatccctggtttataaaagagagactaaggtgcaggaaagaagatgcttgcccaggctagtgagtgtggtgccaggatgtgggcccaggcagtctggtttctgagcctgtcctcttcaccacggggcagtcatgcatcaggtgttgccttcaatggcaccatcatgtagagactgcatggaccccagggccgctgcccttgcattgtcagccttacttctgcacatcccattgaggggctccccctaaatttttcatgtgggatggagactggaggttggggcaggtagccttgaccccattgttggtggtagtttctcacatccccatcctcacacagccccctccttcctgcctgctggagacagctggtgcccagcatcttgtttctgtttatcccagatagccagagtactctgcattcttcgttgctgggtgtgtttggaatctcctcctaccccatcttgcttgggaagcactttaccttttgccccatgtcaccccatgccctgctctcatccccagtactccttcatacttattactggtcagccttcagccagctggcaggcggggcctgcagtccaagggcctcagactcacctttctctcctgaggcactgtctgagcgcctatggaaagcttacactaggagatgggtcaagcgcaagtctgctcctttggaatcatcttttgcgtctttcctttcttacgtccttctagataccctattttatatccatgtctacttccttgggtttaaagcagttttcctttctctccatccccaccgtccacggcaggtctccctgtctatggtaagagaggtgatagtgaaagcagcagccatcccaggttcatggtaaaacacataccatctcctgtatcttgggtttgagggtctaagagttccacctgtgtactgttggacccttccacctggctaggttggtggcatccccagtattggtaaaggactcctggccctattattattaatagcagctcctacttactaagaatttactacgtgctcggcactttacaagcctagtcacatttcattctcaccaaaactctagcaggcaggtgctttttatttgcctatttgcccagagaagcaaacttctttctgatccaagctccatgtggacagagacctcagaatccttaatgtctagctgaatacctggcatagagtagatgcttaataaatgttcccttgactgggtgcagtagctcatgcctgtaattccagcactttgggaggattgcttgaacctagaagttcaagactagcttgggcaacatgaggagacctcatctctacaaaagtcccagctactcaagagggtatgggaggatatctggagctggggagacggaggttgcagtaagccgagaatgtgcctcccacctgggtagcagaacaagatcctatctcaaaaaattaaaaacatttacaaataaataaaatttccctggaaaaatggctgactaacactatttgtatatggtagatgtgattgtccctgttttatggatgaggaaaagggtttggtgctgagtttgaagaggagcagttcaggatgtgtagccccaccttcctcatgaatgatgggacggtgctcctgggaaccgttaaaccctgccctggcagcttgcctaggtgatgtcttcctctttaaatggtagcttgtggtgaaatttcaatcctttctgggttaaggacctgtttgaaaatttgtgacaattgtgaaccctttctcagaaagatgtatgtgcatacaagactcagtatgttgtttcgggggctgaccctgcctcaaaagacagggccacgtgctcactctccttcccacccctctctctcgctctctgttgcccaggctggagtacagtggtgccatcacagctcactgcagacttgatttccctggacttaagtgatcctcccacctcagcttcctgaggcactgagactataagcacacgccaccacatccaactaattttttttattttttgtagatatggggttttgccatgttgcccaggctggtctcgaactcctgggctcaagtgattctcccgcctcggcctccctaagtgctgggattacagatgtgagacattaagcccagccctgttcttgtattttaaagtgctctgtctggtaaccccacaagataatcaccattgccattgctaaatagcattgtccaggccctctggatcccagccctgaccccctgtggaagcctagcgactctatgtcctcatggaatagcccccgcttctgcatcagtgtgttccttgattaaatgtgtccccttaggtgataaaggccacagcctaagaactgccacctttctcagttgaatagtcatgaataattatttctgctgtttgcccaatggtggtgcaacacagtgttagtcattgttttagttttaaggtgtttttttgtttgtttgttttttgttttgagacagggtctcactctgttccccaggctggagtatagtggcactattacagctcactgcagcctcaatgtcccaggctcaagcgatcctcccacctcagcctcccgagtagctggcaccttgggcatgcatcaccatacctggctaatttatgtcatttttctttttctctttttttttgagacagagtctcactgtgtcgcccaggctggagtgcggtggcgcaatctcagtttactgcaacctctgcctcctgggttcaagcaattctcctgcctcagcctcccgagtagcatgccaccatactcggctaatttctgtatttttagtagagacaggtttcaccgtgttggccaggctggtctccaactcccaacctcaggtgatccgcccacttcagcctcccagagtgctgggattacaggcgtgagccactgcgccccacctattttagttttcatatagacgggatctcaccatgttgcacagactggtcttgaattcctgggctcaagtgattctcccacctcagcctcccaaagtgctgggattacaggtgtgaatgtgcctggccctggcctgttttacatttttgagatacatagtttaacccaggcaaatacatttcttaatctcatgttaggaaaataaggtaatgtttggagaggttaaataatctccccatggacacacagcttgtaagggacagagcaaggagataggacaatcaaaattgtctccagacattgccaaatagccctttgggagcaaaatcgaccccagttaagaaccactgccctagactgcttttagaatttttttttccctctattcctcttaaagcacttgagctaaaccctcttttcatttttctccccaggccctgtctcagcgggaccctcctcacaacaacttcttcttcttcgatggcatgaaggggaatgggattgtggagtgccttggccccaagtgaactcaagatttggcagccccagagatgccaactgcagcatgcccacctgtattccctgtccccttccttcatgaaggcatctccaggcaaggaaaactgaagtcattggcccgatacaaaacatttcctgcaacgaaggaggtggtgccgacgtgctgcttcccatcaccagcagctgctcgacaaggggcgcagggtggctgtctttgttccagcactgttcaggctgcctgtcatcccgggcctgccagctcccctgagtgatgagcacttccaagcacccctctgccctttctctgtccttatgctgtcccggcctcgccagccctctggggcattgtgggagatgcctgccaggaatgagcaagctctgttgctcgggagcctcttgtcaccttcttggacttattccccacctgataccttatagagaaaagtgtgaattcaggtggagagtaggcccaggccccatgaggcaccagtggaagcacagctccaagttcagacaggtgcccttagagaggaaaaccatgacaggcaaatgcatttcctctggagtttgagaccctgacaaacaacaggtggcatctggtgtgctgttcttgagttttcgtttaggattagttgagttccagctgggttttgggagaaaggagatgctaccaagtcttggatgttagggcgagaccctgcaagttgagtattagagagcttgtctttcaaggcaggttcctggggcttcagggctaggagggaggagcctgcccttttaacagaaccccagtcacatgcggctcaagtcactcagaggctgttgcatttcagggctatgttggtcctttgtttacctcctaaaccacagctgtttgtgtttcacatatgttgtgaattttccttggttctttttaaaggaatgataataaagttacttgctttaggatttgcttgtttttcttccacttcagaagcttctgagagggaatgggatgatcctaccagttgccttttcagacctgaggctctaactcaagagattcctcctctccctcaccattcctgccaccattttttctgggtgatgcagcaagagttaaattgttcacattctagaatgtgtagaagcttctggctccagttgtctaatggataattcagctaaatagtggctattttcagtggcaagaattataataataaagggaagtcaaaagtgatgcttcatatgccccaagtgccacagccgctacgggtcagagcttttattggaagaccaggtttgccttgatgcagccaaagtgcgttccagttcaccccactcttgcttgtgtttcttctttatgtaaattgtgtgatgtttcaataaatcagtctctttcctattctgatcctgcagcagttagtcggggagaaaagtggtcttcactacagaagggcctctgttcctcaaccctgcatcacctgctcccgccggaggtgagacaggggctgcatttcggaaaggatccgtgtctcgccacctttagtgcaagtcagtggcgtcagggtcagcagttacattgctgcatgaatttcacgtggtctttaaattctgagctaattatactcttgactgtaatgtgcagccttggtcacaagggggagcaggtgggtctggattgataaaaacaaaattgtagaatcgtcccggaagcttcaaacttttccaccctgtacctctaacggcagagattaagtcacccagaggacccctcaggaatcgaggggaaagctgccagccccaggcaagaaatgtctagtttctacaaatttcataaactgccacatgatgtttgtattaatcataaaaatgaagaaaaaaaggccaggcgtggtggctcacgcctgtaatcccaacattttgggaggctgaggcggacgaatcacgaggtcaggagtttgagagcagccaggccaacgtggtgaaaccctgtctactaaaattacaaaaattagccgggcatggtggcgggtgcctgtaatctcagctactgggggaggctgagacaggagaatcacttgaacctgggaggcggaggtcgcaatgagctgaggtcgcaccactgcactccagcccgggtaacagtgtgacactccatctcaaaatctgcagtcagtcaggcatggtgggaggctgtggcgggagaagcacttcagcccaagagttcgtgaccaacttgggaaacaaagcaagaccccatctccacaaaaaaagaaatagctgagcatagtggcttgtgcctgtggtcacagctgcttgggagactggggcaggaggatcacttgagcccaggagtttgaggctgaaatgacctggatttcaccactgcactgaagcctgggtgaaagagtgagacactgtctcgaaaaaaaaatcccagcactttgggaggccgaggcgggcggatcgcgaggtcaggagttcaacaccagcctgaccaacatagtgaaaccccgtctctactaaaaaaaaaaaatacaaaaactagctgggcatggtggcgcgtggctgtaatccagctactcaggaggctgaggcaggagaatcgcttgcacctgggaggcggaggttgcagtgagccgagatcgtgccactgcagtccagcctgggcaacagagcgagactccatctcaaaaaaaaaaaaaaaagttatcttgacgtatgttctattagctcattacaggtgtggaagagatggcttaggttgcaggtggtaagtttaatgataacaaccaatggtcattatacccatgcaacctgcctggtacttttcagaatccttgttctttgagttggaatccccacagcaaccccatggggatagatgctgttctcctacccatactggagataaggaaacaggctcacctcacaagcaagggagagatggaaatggcgctgactgggaaagctgcggtgcggggcactcagtagagattcatgtagtggcacggcttgttcgctcagtgagaacaagattttgggcttcccttcacaagtccctgagacccagtagtcactggaaaacatcatgtcggccttcataaaagagggccttcaactaggtccaaaagggtgggtggatttggttcctaagcttgtacgatattcaagcaatatacaagcataaagagaagattcctctccgctgcagggcacagcctgtcagcacaatgttggccacataataagagcagctgacttcacagctaaactgcattttggagagaaatatgagatgctttttggacatgttagctgtatccactttctttttttctttttcttttttcttttttttttttttaatagacggagtcttgctctgtcacccaggctagagtgcagtggtgtgatctcggctcactgcaacctccacctcctggtttcaagcaattctcctgcctcagcctcccaagtagctgggattacaggccccggccaccatgcccagctaatttttgtacttttagtagacagggtttcaccatgttggcctggctgctctcgaactcctgacctgaagtaatccacctgcctcagcacccaaaatgctgggattataggtgtaagccacagcgcccagcctagctttatccactttcatatccactccccggaggtcacccctgttaactgttgagagtgaatccttccagactgccatgttcaaacctagactctaccactcagccatgtgaccctcgctacactactttctgttaccccatccctaaaatgggtagaatagtggcacattcctcagatatgtggggattaaaaaatcagtctttgaatcaatattgctcaatgttagctgctattttacatattcataaataactttttctccaatgtgcttttttctcaatatgtcttggagatccttgtcagtatttcatgcatcaaattccataaccaaaacaggtgaaccattaactattgaatcagtctgctgctgtgtgacattgtgcacacttaggaaagacttcccaaagccaagttccagggttagcaagtataaaaatgcattttaggagttggttcttgttttttattttgttttgttttttgagacagagtcatgctctgttgcacaggctggagtgcagtggcgtgatctcggctcactgcaacctctgcctcccggattcaagcaactcctctgcctcagcctcctgagcagctgggaccacaggcgcccaccaccacgcctggctaatttttctatttttagtagagacggggtttcaccatattggccagtctggtctcgaactcccaacctgatgatctgcccacctcagcctcccaaagtgctgggattacaggcatgagccaccgtgcccagcctgttttgtttttttagtgatagggtcttactctgccacccaggctggagtgcagtggtgtgcaatcatggctcactgaaatcttgattttgagggctcaaagtgagtctcccacctcagtctcttgagtagctgggaccacaggcaggcaccaccatacctggctaattttttcccccggctaattttttttttcttttctttttcttttttttttttgagttggagtgttgctcatttgcctaggctggagtgtagtggcatgctctcagctcactgcaagctccacctcccgggttcacgccattctcttgccgcagcctcccgagtagctgggactacaggcgcccgccaccacgcccggctaattctttgtatttttagtagagacagggtttcagcatgttagccaggatggtctcgatctcctgacctcgtgatccacccgcctcggcctctcaaagtgctgggattacaggcgtgagctaccacgcccggcctttttttttttttgtatttttagtagagacggagtttcaccatgttccccctggctaatgtttttaaaattattggctgggtgcggtggctcatgcctgtaatcccaacattttgggaggtcgaggtggctggatcacctgaggtcaggagtcaccagaccagcctgaccaacatggtgaaaccccgtctctactgaaaatacaaaaattagctaggtgttgtccacatgcctgtaatcccagctactctgaaggccgaggcaggaaaatcgcttgaacccaggaggtggaggttgcagtgagccgagatcgagcagttgcactccagcctaggcaacaagagcgaaactccatctcaaaaaatatatatacatatttttagtagccatgaggtctcactatgttgcccaggcttaaactctggcctcaagtgatcctcttacctcagcctcctaaagtactgtgattacagatgtaagctactacgtctggctggtacttttctttcttttctttcttttttttttttttgagatgaagtctcactctatcgcccaggctgtagtgcagtggcacaatctcggctgactgcaacctccgcctcccgggatcaagcaattctccaacctcagcctcccaagtagctgggattataggtgcacgccgcccagctaattttttaatttgtaatttttttactttttatttatttattttgagacagagtttcactcttgtcacccaggctggagtgcgatgatgtgatcttggctcactacaacttccacctcctgggttcaagcaattctcctgcctcagcctcctgagtagctgggattacaggtgcccaccaccacacccaactaatttttgtatttttagtagagacagggtttcaccatgttgaccaggctggtcacaaactcctgacctcaagtgatccacccgcctcagcttcccaaagtgctgggattacaggtgtgagccaacactaccggccagaaatttacagatgttaaaggctcagtgaatcccaaacgggataaacatgaagaatatcatgtttagaaaaaacatctaggtggccgggtgcagtggctcatgtctgtaatcccagctgctcaagaggctgaggcaggagaactgcttgaacccaggaggcagaagttgcagtgagaatcatgtcactgcactccagcctgggcgacacagcgagactcagtctcaaaaaaaaaaaaaaaaaaaaaggaggccgggtgtggtggctcacgcctgtaatcccagcattttgggaggccaaggcctgaagttgggagtttgagactagcctgactaacatggagaagccccatcttgactaacatggagaagccctgtctctactaaaaatacaaaattagccgggcaaggtggcacatgcctgtaatcccagctacttgggaggttgaggcaggagaatcacttgaacccaggaggcggaggttgtggtgagccaagatcgtgccactgcactccatcctgggcaaaaagagcgaaattctgtctcaaaaaaaaaaaaaagaacctccatctccatgcttaaatacttgtgagcagggcaaaggccatgcagagagtgttcacacccagaccaacgccctgcttcgccttcactgcagtgcatgccatccctttggtagaggatgagacaccttcccataactggctcccctttctcataatatgtcttagaattattaacatggttgaatttaggtctaccatttgctttccatttgtcccacttttgttcccctgtttctcctttcctgccttctcttgaagtatttgattaatttttttttttttttttttttttgagacagagtctcactctgtcacccaggctagagtgcagtagcgcgatctcggctcactgcaacctccacctcccagcaagtagctgaggttataggctcccaccaccatgccagcgaatttttatatttttggtagagacaaagtttcaccatgttgatcaggctggtcttgaactcctgaccttaagtgatccacccacctcagcctcccaaagtgctgggattacaggcgggagccacctcactcagctaaatgttctaataaatacccatgtacccactattttgccacttgcagtttttattcatcattatctgtcatttttcttcatgttggtaaagctctagttcattcccgctaatggatgtatactattctgttgtgtgattacatcggacaaaaaaagttttttgttttttttttgagacagagtcttgctctgttgcccaagctggagtgcagtggcgtggtcttggctcactgcaacctccacctcccgggttcaagcaattctcctgctttaccctcccaagtagctggggttacaggtgcccactaccacaccggccaattgttgtatttatttattatttatttattttttattctttttgcgtctcactctgtcgcccaggctggagcgcagtggcacaatctcagctcactgtaagctccacctcccgggttcacaccattctcttgcctcagcctcccaagtagctgggactacaggtgcccgccaccacccccaggtaattttttgtatttttaatggagatggggtttcaccatgttagccaggacggtctcaatctcctgacctcgtgatccgcctgcctcggcctcccaaagtgctggaattacaggcgggagccaccacacctggccctatttatttttaagacggaattttgctcttgttgcccaggctggagtgcaatggcatgatctcggctcactgcagactctgcctcctgggttcaagcgattctcctgcctcagcctcccgagtagctaggattacaggtgcttgccaccactcctgggtaatttttgtatttttaatagagatggggtttcaccatgttggccaggctggtcttgaactcctgacctcaagtgttccacgtgcctcggtctcccaaagtgctggtattataggcgtgagccactgcgcccggccgatctttcttcttttttttttttttttttttgagatggagtctcgctctgtcacccaggctggagtgctatggcacggtctcggctcactgcaacctccacctcctgggttccagcgattctcctccctaagcctcccaagtagctgggattacaggtgcctgccactatgcctggttaatttttgtatttttagtagagctggggtttcaccgtgttggtcaggctggtctcgaactgctgacctcatgatccgcctgccttggcctcccaaagtactgggattacaggcatgagccactgcgcctggctgcccggccgtatttttattgttttttttgtttttgtttttttgttttttttgagacggagtctcactctgtagcccaggctggagtgcagtagcacaatctctgctcactacaacctccacctgccgggttcaagcgattctcctgcctcagcctcctgagtagctgggactacaggcgcatgccaccacgcctggctaatttttgtatttttagtagagatggggtttcactatgttggccaggctggtctcaaactcctgacctcgggctcccaaaattttgggattacaggtgtgagccacctggcctggccaccacatgggactatttaccctaccaactgctgttggatacttagatggttttgtgcattgccagtacttggatacttgtatgcacccgtgttcctctaagggggacgcccacaaaagctattgctgccacaaggtatgtgcattctcatcttgacaccatgtcttagtctgttttgtcttgctgtaacggaattgcacagactaggaaacgtgtaatgaacagaaatctgtctgggcgcgctggctcacacctgtaatcccagccttttgagaggccaaggcaggtggatcacttgagatcagtagttcaagaccagcctggccaacatggtgaaaccccatttctacaaaaaattagcccggcatgttggggcatgcttgtaatcccagctactagagaagctgaggcaggagaatcgcttgaacccaggatgcagaggatgcagtgaactgagattgtgccactgcactccagcttgcgagacagagtgagattctgtgggagacagagcgagactccctctcaaaaaaaaaaaaaaaaaaaaaaagagaaatctatgggctcacaaatctgaaggttgaaaagtcccagatggtggggctggtatttggtgagggccttccggcttccttgtaacatagcggaaggcatctcatctgagacagaggggtgaactcattctttataaggaatccattcccgtgaaaactcactcacttccatggtcatggcattagtgcatttctgagagcagagccctggtgacgtaattatctcttaaatgtctcacttctaaaatctgtagcactgcaggttaaatttccaacccaagaactttgggggacacattcgtatcccaacacacggttttatcaaatgcttctccaaagtgattgttgccagttaccacaccctggccatccagatgggccatttcccctagtgtccctttagcagcaaggacagttgggaaagggtggagctgggactgaccctgtgtctgtaaatattatataattatataccctgcttcagagtccccctctgttgccctggagtgcagtggcatgatcatagttcactgtagcttccaactcctgggctcaagctatgatccccctgcctcatcctcctgagtagtgggtactataggcatgtgccaccatgcccagcgaattaaaaaaattatttttgtgtgtgtggagatggagtcttgctatgtttctaggctgttctttttttttttttttgagacggagtctcgctctgtcgcccaggccggactgcggactgcagtggcgcaatctcggctcactgcaagctccgcttcccaggttcacgccattctcctgcctcagcctcccgagtagctgggactacaggcgcccgccaccgcgcccggctaattttttgtatttttagtagagacggggtttcaccttgttagccatgatggtctcgatctcctgacctcatgatccacccgcctcggcctcccaaagtgctgggattacaggtgtgagccaccacacctggcctataccttgcttctttctctttctttccttttttttttttttctggagacagtctccctctgtcgcccaggctggcgtacagtggtgcaatctcggctcacttgcaacctctgcctcccgggttcaagggattctcctgtctcagcctctcgagtagttgggactacaggcttgcatcgccacacctggctaatttttgtatttttagtagagacagggtttcaccatgttggccaagctggtctcgaactcctgatctcaggtgattcgcccaccttggcctcccaaagtgttgggattatgcccttccttccttccttccagacagggtcttgctctgtcacctaggctagaatgcaatggcaggatcttggctcgctgtaacctttatctcctaggttcaagcaattctcctgcttcagcctcttcagtagctgggattacagacactcgctaccacgctcagctaatttttgtatttttagtagagacggggtttcgccatgttggtcaggctcgtctcgatctcctgacctcaggtgatctgcctacctccctgcttctcattgaggtctctgccagtcaggtatcagcacagggaaagggctcaagggcagtgtgtggccatggccctgtttgcagaagatggcagtaggagcaaccctttctacatttactcaacacagccgcttatgaccagcctggttaggcctcagggcagtgtgcggagactcactgtgatcttagctccaggtgctcctccagctggagaggcagcctacggctgatcacagtgcaaggccagatgtccctttctgtctctgtgacggcagaaacgaggtctgtctcatgactctatcccaagcacttgtcacagtggtgcctctgaatatgttacgggtcattcactcatccattaaatatcaagcgcccctacaacacctcatggggacttcactttttattttgtttttgagacagggtctcaccctgtcacccaagcttgagtgcagtggcttgatcatcgctcactgcagcctccaattcctgggctcaagtgatcctcctgcctcagcctcctgagtagctgggactacagacacacaccaccatgcctggctaattttttttatttttttatttttgtagagacggagtttcatcgtgttgcccaggatggtcttgaactcctgggttcaagagatctacccacctcggcctctcaaagtgctgggattacaggcatgagccatggcaccaggccaagcttcacttttaccgggaatggggatgatgaaggctaggagcgtcccggtctggagaagcccaggccccttagcctttcttctgatggagccacaactgccagggcccacctctcccacccactcacaagcagggctcacagagcagagcccccgatcagaagcctctccaaggccaggctgcagggaaggcaagcagaaagagtatccactgttccaatctgattttattgaaaaggaaacatacaaaaatcatgtacaaaaaaaattaaccaaacatgtacagaaaattcattccggtatctacagcagcgcatatacagtatcttacaggctgggccatccctccccactcccagactcctccctcttccgagatttccccccctccctgactccccgtcttccccccagcgcttggccctggggactaaggctggggcggcttcagccaaaatctcccaccccccaaatgaatgccagtggtcacacgtgctctctctaaacctatgcaatgggattgatggggcggggggcggtcacgggcagagcacaggattcacagtctgggcccctcctggccaccccctgatgaaggtgaggcaggcatgcccaccacccgccggctggctcagggaagatggctgggcgccgggctggagcaaccggcaaacgagccccactctctggctccaggaggctagtggtcacgtttggctcatttgctcttcacgggccccctcccaggaggagggggggaagcaccaggggcctgaggccaggcccagagtgaaggagcaccgagaggagagcccccccctcccagtgtcacccctgcagctggaacgggcaccagcacaacagcctttcctgagatggtggtgggcggcagaggcgggcggctcagtccccaccccctcggtcaccgccaccttccgatgctgagtccatcagccgtccctctcctggcttcttggccagggacccaggagtccgcatctccgtcagtgcaccccaggctgggctggggctggagtggctgccccggcccgcccccgggacaggcagggctgggagtccagtatgctacatggtgcagagaaagtcccccgcgctggccagggtgtcaggaggtgggaggggcctgccccccgagtccctgacgtccaccgggcgggtgcaggcacctaattgggctccatctcgggggctctgtggcccctgggtaagggcaggagtcccatgatgagattgtacaggaccctccagggtgaggggcggtgccgctgctgctcctcttgtctctggggaaaagagagagaaggggcagttagcaggggactgagtatggtgatgggagtggggatggtcagctccaggggcagcgaggcgacagtctcgcccaccctattccagctcctccccccgcctgggctaatgtccatgtctcggaggtcacatcctcatccaggacatgagacctggaggcagaggacaaacacggaatgccttcagcagagagctgggcaccaagcgagtgcgtggcacattagctgtgactgccccgtctctgttgtacatttgagaaagacatcccccaaggggctgaaggatggactgcaacctatcctgcccctccctacagggctggcaagatgaggagaaaggagcagggtgcccacagtcttggcagttctagaacaatctgtggaaggaggagaactgggaagagccccccccattgcagaggcttcaacagaagcacctctaggcaacgccgagtgaaacccctgccccctctccagtggcaggatgaaaacaaggtggtctctaggaccctctcagctccaacatcctaggaagtgggcaggcaggaggctaggtcctaggaaaggctcccgactggtaaaaattaaaggcaatactaaaaagagtacagaggcccggcgcagtgacttatagctgtaatcccagcactttgagaggccaaggcgggaggatcacctgaggtcaggagtttgagaccagtgtggccaacatggtagaaccccgtctctattaaaaatacaggccgggcgcggtggctcacgcctgtaatctcagcactttgggaggccgaggtaggcggatcacctgaggtcgggagtttgagaccagcctgacctacatggagaaaccccatctctactaaaaatacaaaattagccggacttggtggcacatgtctgtaatcccagctacttgggaaggctgaggcaggagaatcgcttgaacctgggaagtggaggttgcggtgagccgagatcgtgccattgcactccagcctgggcaagagcaaaactctgtctcaaaaaaaaaaaaaaaaaaaaatacaggccgggtgcggtggctcacgcctgtaatcccagcaccttgggaggccgaggcgggcggattatgaggtcaggagatcgagatcatcctggctaacacagtgaaaccccatctctactaaaaatacaaaaaaattagccgggtgtggtggcgggcgcctgtagtcccagctactccggaggctgaggcaggagaatggcgtgaacccggtaggtggagcttgcagtgagccgagatggcgccactgcactccagcctgggtgacagagcgagactccatctcaaaaaaaaaaaaatggctgggcaaggtggctcacgcctgtaatcccagcactttgggaggccaaggcaggtggatcacctgaggtcaggagttcaagaccagcctggccaccatggggaaaccccgtctctactaaaacaacaaaaattagctgggcctggtggcacacacctgtattcccagctactagggaggccaaggcaggagaatcgcttgaacccgggaggcggaggttgcagtgagccgagattgcaccactgcactccagcctgggcaacagagcaagactccgtgtcaaaaaaaaaattttttttaagtgtacagagagctgcaatcctctgccactccctgtagctccacaggcaggctctgtgctaagtggggaccacctaacctccttcccttcaggtgcaggggaaggagaaactcactttacagaaggttaaatgatcctcatcgtcctcatgctacctggtagtgagtcgcctggtaccagcccagcctcctcaacactccctagcaactcttggggccaggagatggtggcaaagggggcacatcggattggtgtaagttacaaaacccaccactgtcacactgctgtgggtgccacctggtgagaaagctagcaatcacctagtaaggtggatggtgggcagaccacccaggtacctactctagaaacacaagagcgcacccggaaatatgcatgattgggagaggaaaaaaggcaataaataatggccgggcgcagtggcttacacctgtaatcccagcactttgggaggccgaggtgggtggatcacctgaggtcgggaattcaagatcagcctggtcaacatagtgaaaccccgtctctactaaaaatacaaaaattagctgggcatggtggcaggcatctgtaatctcagctacttgggaggctgaggcaggagaatcacttgaacccgggaggtgaaggttgcaatgggccgagattgcaccattgcactccaacctgggcaacaagagcgaaactctgtctcaaaaaataaataaataaaataaaatctgaaatacatttaaaaatagtctgggtgaggtagctcagacccataattccagcaatttgggaggccaaggcaggaggatcacttgaggccaggagtttgagaccagcctgggtaacacagaaagacctgatctctacaaaaaaataaaataaaaattagccaggcatggtggatctgcctgtggtcccagctacttgggaggctgaggcgggaggatcccttaaacccaggagttggaggctgcagggagctgtgattgaaccacggcactccagcctgggagacagtgagaccctgtctctaaacataaaataaaaatacatatctatcctaaatatccatcaatgagaaaatgaataaggatactatgtttatccaacagaatactatgtagcagtgaaaatgactttttttttttttttttttgagacagagtttcattctgtcctccaggctggagtgcagtggcatgatctcctgatctcggctcactgcaacctccacctcctgggttcaagagattctcctgcctcagtctcccaagtagctgggattactggcgtgtgccaccatgctcagctactttttgtttctttttttttttttgagacagattttcgctgttgttgcccaggctggagtgcaatggcacgatctcggctcaccgcaacctctgcctcccggtttcaagcaattatcctgcctcagcctcccgagtagctgagattacaggcatgtgccaccacgcctggctaattttgtatttttagtagagacggggtttgttcatgttggtcaggcttgtctcgaactcccgacctcaggtgatccgccctcctcagcctcccaaagtgctgggattacaggcatgagccaccacgcccggccttaatttttgtatttttagtagagacgaggtttcaccatgttggccagactggtctcaaactcccaacctcaagtgagccacttgcctccgcctcccaaagggctgggattacaggcgtgggccactgcaccaggccgaaaatggctgtatttgttgtttcttttttgagatggtcttgctctgtcccccaggctggagttcagtgacccttcatggctcagtgcagcctcgacttccttggctcaagggaccctttcacctcagcctcccaagtagctgagactacaggcccgcgccaccacacccggctaatttttgtattttttgtagcaacggggatctcattatgtggcccaggctggtctggaactcctgggctcaagcgtccttctatctccgcctcccaaagtgctgggattacaggagtgagccaccgtgcctggctgaacatagatgaatggaagctcttttgcccatatggtgaatctgaagcctaatattgagggaaaaaggaattctggggagaaacaaaaactatgtcatatacgctaagctaagaatgctccatgattctaagccctggttctggcctggtaaatacggagtaaaagcaacacctgcaggggttgagagaggccaactcgagagatttcctttggatgcaaggagggggaagggatggggagagtaaggagcttcaccacatgcgtttctgcggttttgtttggtttcttaataagcaagcaatgcgggtgtaatgttcaaactgaacagagctgcctggtgggcgcatgatgtttgtgatttcccattctctgctgtgggcttcgaatatttgttttaaaaaatcgaggccgtgccaggggctggggggcggggcctcccgcggggcggggctgcgagcccacccctgcggtccccggcccgccccggcgcccgggaaactgtgtggcgctgcgggccgcgcgagagggacggcagggggcgggcgcggcgcggctgctgactcaccggctataaatagcccgggatatatgagccgcgccgcccagcgccgccctcagtccccgcggccgcgggccacgggcgcgcagctccactcctcggcggcctagtccctggccctggccctggccctggctcgggctccggctatgccagccgcggcgcggagtccttgggcggctctgcgggcgcgcgattcccccccacccacttaccccccacctgcctgtccgcggagcgacccagccgcgcagggcagcagctgccgcacatctggcgggggccgcctgccgccccctcctccggcggaagtcccacctgccgtctaccccacccccagcactcacccgccgctcgtactgtgcgttgaggtcgtccgccatccgccgcagctgggccccgatctcccgggcccactgttcctcctccccgcggactcccggggccgcctgggtgggaccgcccgccagagcccccggggcgctgggcacgggcgactccaggtgctgctccgccagcgagagcgagggctgaggaccttggagaggcagaggggcgcggtcagcacccaccacccctccaggcctcgaggtgtctcggcctgctcccctctttcccagccactgctccccgcctcatttctagtgatcccatcgctagtgagtcaatttctcagcttctcctccacaggcaccagaaagcaagaagtacctggggacgccgctctggggtcacctgtctggccagctacgtccccacggcccttgtcagtgtggaaggtagacggccagagaggtgaccccgggggtggtcaggcttaacgacctctattttccaaaggggccacattttgccttttccatgtgacaggcagggaaactgaggcccgcccttagggagtatcccaaggtcacacagggatacagtgactgaccccacccagatcacaagcctcaggtctcctgccctctcgtgtccaaccacagggaagccacacctccggatgtggcagaggcctagagaccagaaggccagagactgtggcagcttcagagcgcgggcctggggggctgggacgcgggagatgccttcctgccccccccccccccccacttctgagcgccctaggaggctcctgccctcccgtcccaccaggtcctggcctgagggttccctaaggcctacagccagggcctcagtttccacatctgtgaccttggccttgaaatcggtgtccccttccagggcttccaggaactgagttagggaagttttctctttcctcgctccccttgggctgccgggacaagatgggggatgggaaaccaggacacactttccctagagcgcctgccggcagggatggggctccacgggcaccacagggttaacagcccatcaggcaggggacctttaacccttccctccccaagactcccccacctccccgaggggacttcccaacacaatggcccctccccctctccttcctccgccgggactgctgaggacagcccctggccaaagagatgcaaataaaagcaaaaggcctctcgacccctccccagaggccagagttgacagtcctcccgctcggcccactctccctgcaacaggaatcctccagggggtctagaggacccagactgggggaggggagctgggatgcagctgttgccccaggcccggaagagacagtgggctgcaattcggggactgcagtcagattccaggagggacttcccacttgacctccccctccacccccagcctccgtcttcctgcttcttgcaacacaaagaccacattggccacaccctcccagtggcccggctgggcccgccacctccccccgtcctctcccacttctccagttcctccgagtctccagccctctctcttcccggctcctatcaccccgggggcggggcgggcactcaccgtccgggcgcgggcctcggggccggctgcggggacccccaggccagcgggaaccccccagggcggcggtgacggcgggtggggcggtgggggcgcagaggtaggcagcgggcagcagggtgggggcggcgggggcggcagccaggccgggctcgcagaggccgcaggacactgccgagggcaccaggcggccgagcgggaaggggcgcgggccgtcgcgggccaggccctctacgggctccggggagctgccctcctggcgtgcgcgggccatggcgctccctggggcctgcgggacacgggaggaggagcaggtcagcagggaagtaccagggcccactgtacctccagcctacccggggttaggacccagatggagaagagtggaggtgtgtgtgcatgcggagggggtgacggccccacagagacacgcccagccgggggatgacaccaccgggtcctggctggcctggagagcctcccgtgcatacggtgatgggcacacaggagggacagggggcacaggacggctctcacagcaaggacagggctcacacaggacggatggaggggtctagcaggtgtgtgtatgagggctgtgacagtcccacaacacaaactcactccacttgggactcacagcatgggctggtggggacaactttcccaacacagcgacgggcacacagggagggcagtgaggcacagcgaggcccccacagcacacacacaaggactcacacgggactggccagcctgaccgcccaccccacctcccacttgcacacaaacactgagatggccccagtctcggacatcactactcagtacacacaatacacacacacccccgaccaaagcaggagcatccagacagaccatcacaagcactctacatactgcgcacactggctggcacaatccatccccacacatccaaactgtcaaagtctcacacactgacccactgttgatatgcccaggggcacatgcaaacacaatgcagcctttgcaaacacaaacacacacacacaagctaggcactgcctcagttcccaaacatgcccctctccacacacacacactcactccagagataagacctgcacacctctggactcacatatcaacacaaaacagacacccacggacacacatacatcaacacccccaaaacacacccacatgtcaccaactctcaggacacacgtagatcaggcacacacagacacatgccatcagacctcaacacaccaccagacaccaacccaccctcctcacgcaaccctcaaacatcatcaccaactgtcagcaacacacacacacacacaccctacagctaactctaatcccacacagcccagcagcacacacacctagcgcacccacagaaaacactggtctcacgtgactgacataaacactacacacacgcagcccacatgacacacatgagccagccgatcacagtgacaagcccctcagacccaacacacacacacacacacaggctcagacacaaccccatccagaggctgccagcaacacccaccgtctacactgcatagaccccacagatcctgggtcctcaaatcccagacgctgatgccagacacacaagccaaacccagactgaaacaaccccccaccacacacatacatacacacacacactcacacctgacaactcacacagacacctggacagaaaacagacatttgcatttagcaggcgcagcatcacaaacgctgggcaaaagacacatgccccggagatacagagacggcctcagccaagacagaaacacacaggcaagacacaagcacacatatcgcacgctcgggcaagacacacacataaacacacaaacagctcactccagcaacacacacacactacaacctccacaccccagcacacgcaggcaccacagacccccagtatcatcccggaacagcacacacagacaactctcaccgacaacacacgcaggtccacccaccccacaagcagggcacccacagacagaaccccacacaaacaggcgcggggactcacgcagacaccccgacgggtcagaaaccccaacattcctctggatcgacaccaccactccctgcagaacccagcacaaactcggagccagacacgcgcacacacccaggcgagacacctgcagatccacaaccccgcacacgcgcgctcccacggcggtcccagacacccccctccgctgtcacagccccccccaccgccgccacgtgcgcccgccccgcccgccaggcgagcgcggggccaataaccggctgttgctggggcgcagcccccgcccgcaggagccgcagactccacggcccgcgagccgccccccgtcgccgcccccagcgggcgcgcgccctgggtgtggccgcccctccgtgccgcccccccgcccctcccggactttgggggctggggcacccctggggtcgaccctcttccccggggccgcactggccgccagggggcgctgccgagcccgcaccccattgtttgtaaacaaacccgccagaccgccgaggcacctgtgcgcccagaccggcgccccaacgccgagccgcctctcacccggcgaccctggcccagggtccctcgcggggtttggagaggcgcggtgtggggaggcagggcgcccacactgctctccgcctgcactcctgtcacctcctccagggagtccacccggcctggccgatcgccgccggagaggattcggggcgcgcacactcaccccgggggcatgaacacgccggagggggcggcggtggggggcgggcggcttccttcaggagggcgcgcccgccgagcgccgctctccgcggcggctgctgctgtggctgtcgctgctgctgccgctctaactgcagtggcggctgctgtggctgtggctgctgctgctccccgggccgcaggcgcgtccgcgtcgtggccgctgctgggatcgctggtgccgccgccgccgccgccaggcgcccgctcgcatgtggctcgcgccgcgtctcaggccgcccggcggatcccgggcccgctccaaagccgccccgccccgccccgccccgcccccgcccggcgggtcccacgccccgcccccgcgtgacgctacggccccgcccgcccgccgcggacaagtcaggacttgcaggcgcgcgccgcgcccccccctacctccgcgccgggggtttccctgcagcgggggacggggcagggcctagcccaaggcaaggaggacccaggcgctgtgcggcggggtgtggggagatcgcccagacaccgggacagtcggacacacacactgactgggacccacagatccacacccccagcgatgcgtacacagaccgaccgacgggcgttccagggtccacaaagtcacgtgcaggcagagcccagaggatgtactcacagacacaaggccacagtctcgcaaatccacaccatggacaggggcatgagcacacacactcacatactgatggggctcacacttacacacacccagacggaaatgcacagactcactaacagggtcccctggacaagcagacggacacaatgacagggccacacacagttgcagaaacacccacactgatgatcacacctgggcccacaaactgtgttcacaaacaaccctaccgaacaggcacccacaccacacacacggtggtgcaaccacacagacataggcggagtgcttatcaggaaacacaaacttgctgataggcacaggggacacacacatacacacagacacctgttacagggatacctggatacacggccaaatccaaatcacactcccacagggacatacacaaatgcactcacacaatttcacagctaacacattaaaactatcagaaagtgacattcgcccgacacggtggctcatgcctgtaatcccagcactttgggaggccaaggtgcgtggactgcctgaggtcaggaattcgagaccagcctgaccaacatgatgaaaccccatctctactaaaaatacaaaattagccgggcgttgtggcgcatgcctgtaatcccagctacttgggaggctgaggcaggagaactgcttgaacccgggaggcggaggttgcagtgagccgagatagtgccattgcactctagcctgggcaacaagagcaaactccgtcttaaaaataaaaataaaggaaagaaactgacattcagagacacaaaccaaatcagacatagaagaaactgaccacccacacatgtcacaaagtcacacctgtgacagcttcttgctaactggcccactgcacacacgtcggagcatgcacacctggccacactcaccacaaatctggcaggggacccacgtcgtggaagcagccctgggcacctggcatggacatgcctgggcagaccccatgccaaatttcatcctgtctcatagctttccattccgtttctttttcagtttctcattgttacttcctgccctgctctggtttggtgagttttgtccttcctttttccaaagccgtggattcctgtctcctctacactttccatccttactgggtctcacccaatcgcaatcgcctcaccagagtgactcaccttccagtgcctagtgtggggctggctgagtaaggatgtcagacttctcaaacttgactgcctccaagtacacactcttagctcccccaagagatgcaggtaatctatatctcacgtgaaatctccccatttgcaacattgggaactcctcagctttcctccctctttcactttccctcctctttcgctttccccgattattcattgtcccttccttcttcctggtgttttccaaactgtgggtcatgagtaaaccatggattatgacatatgacatcacttacatggatcttacttttttttttttttttgagacagagtctcgcgctgtcgcccaggctggagttcagtggcatgatctcggctcattgccacctccgcctcctgggttcaagcaagtcttctgcctcagcctccctagtagctgggactacaggtgtgcgccactatgcccagctaatttttgtattattggtagagatgcggtttcaccatattggccaggctggtctcaaactcctgacctcgggatccgcctgtcttggcctcccaaagtgctgggattacaggtgtgagccactgcactcagcttttttttttttttttttttgagacggaatgtcactctgttgcccagactggagtgcagtggcacgatctcagcaaactgcaagctccgcctcccaggttcaggcctttctgcctcagcctccccagtagcagggagtacaggcgtctgccaccacacccggctaattttttgtattttttagtagagacagtgtttcaccatgttagccaggatggtctcgatctcctgacctcgtgatctgccctcctcggcctcccaaagtgctgggattatggcgtgagccactgcacctggcccagccttttttttttttagataaaagattcactctgtcgcccagattggagtgtagtggcacaatggatagccttgtggtacaatagccttgcagcttcaaactcctgggctccagagatcctcctgcctcagcctcccaagtaactgggactacaggtgtaaaccaccacgcccagctaatttttatttttttgtagagatgggcggtctcgctatgttgcccagtctggtcttgaccttatgggctcaagcaaacctcctgcctccgcctccctcagtgctgggattacaggtgtgaaccaccatgcccggctgacttaatgcattttactcagtaagatgcattcacatcccaaccaacttgcgctttactgagatgtatttagacacaagaatattcactctttttaggtgtatggtgtgtaagtggtgataaaagtacacaattttgtattaccacaacttctacctgcaattttactgacctagacaagaggttttgttgttgttttaattgagacagattctggctgtgttacccaggctggtttcaaactcctgcgctcaagcgatcctcccacctcagcctccctagtagctgggattataggtgtgcatgactgctttgaccagagttaaaaaaaaatacaccacaggccgggcatggtggctcacacctgtaatcctagcactttgggaggccgggggacgtggatcacctgaggtcaggagtttgagactagcctggccatcatggtaaaaccccatctctactaaaaatacagaaattagctgggcatggtggtgggtgcctgtaatcccagctactcgggagcttgaggcagaagaattgcttgaacccaagggaaggaggtttcggtgagccgagatcgcgccattccattccagcctgggcgacaagggcaaaactccgtctcaaaacgccaacaacaaaaatacactacaggctgggcacggtggctcatgcctgtaatcctaacactttgagaggccgaggcgagtggatcacttaaggtccggagttcgacaccagcctggccaacagggtgaagccccgtctttaccaaaaatataaaagttagccaaaaattggtggcgcacacctgtagtcccagctactcgggaggctgagacgggagaatcacttgaactcaggaggcagaggttgcaatgagcagatatcgtgccactgcactccaaacagggcaacggagcaagactctgtcaaaaaaaaaaacacactacaaaatacaattttgaggccgggcataggggctcacgcctgtaatcctagcactttgggaggtcgaggtgggtggatcacctaaggtcaggagttcgagaccagcctggccaacatggtgaaaccccgtctctactaaaaatacaaaaattagccgggcatgattgcggtgcctgtaatcccagctactcaggaggctgagatgggagaatcacttgaacccgggagacggtggttgcagtgagccgagattgcaccactgcactccagcctgggtgctgagccagactccctcttaaaaaaacaaaacaaaatataattttaaaaaattatgaagtcaacggaaagtaatattttgtggaaattttattgatgtatagtgaatacatattaggttacaaggaaggtatttttctggccatagatcgagttcaaagacgtttgagaaatgctgctttagacacttattaaatgagatcacactggaagtcatttagtgcagtattggacatatagtaagtgcctaataagtgttagctattatcacttgtataactaattattgtcagtatttcctgttgcttgacactgatgaagttgagagaggggcagtctctagccctctgctagctcatggtcccacctgtacctcacacctctcactcactgatcaatgtccagactgcccattgcagggtagatactcggaggccagatgtactggaatgttctttttttttttttttttaagacggagtctcgctctgtcacccaggatggaatgtggtggcccaatgtctgctcaatgcaaccaccacctcctgcgttcaagtgattctcctgcctcagcctcctgagtagctgggattacaggcacctaccaccacgcctggctaattttttttgtatttttagtagagacggggtttcaccatgttgaccaggctggtttcgaactactgatctcaggtgatccacctgcctcagcctcccaaagtgctggaattacaggtatgagccactatgcccagcctggaatgttctcttcttctcctcctcctcctccttcttcttttttcttcttcctcctcctcctcctcctccttcttctccttcttttttcttttcttttctttttttagtaaagatggggtctcattatgttgcccaggttggtctcaaactcctgggctcaagtgatcctccctccttggcctcccaaagtgcctggattatggtcatgaggcaccatgcccagccccggaatgttctttatttgtttgtttgtttgtagagacagggtctcactatgttgcccaggctggtctcaaattccagacctcaagcaatcgttcctccttgacctcccaaaatgctgggattacaggtgtgagccaccacaccggcctataatgttcttttgagaagaaaatgagtgtgaaggatagtgggaatctggcttggtggctggaggtagaaaagatggggagaggccaagagtctatttggccataagcgttatcactagtcaaaatcctccccacagctgggcgtggtggctcacgtctgtaatcccagtatcacggaaggccgagatgggtggatcacctgagcccaggagttccagaccagcctgggcaacatgcggaaacctaactggggaggctggggtgggaggaacgcttgagcctgtgaggtcgaggctgcagtaggctgtgatcgcaccattgcactccagcttgggcgacagagcgagaccctttctcaaaagcaaaacaaaacaccagcctggccaacatggcaaagcctcgtctctactaaaaatacaaaaattagctgggtgtggtggcacatgcctgtaatcccagctactctggaggctgaggcagaagaatcgattgaacccgggaggcggaggttgtagtgagccgagatcgcgctactgcactgcagcctgggcaacagagcaagactccgcctcaaaaataaaaaaccgacccccacccccaaaacaacaacaacacaaaacccttgtgggcaaagaaaaagaagtttgtgggtgggtcaagggctgcctctttttttttttttttttttgacagggtcttgctctgttgcccaggctggagtgcagtggcatgatcacagctgatgatcacagctcactgcagcttccacctcctaggctcaagcaattctcccacctcagtttcccgagtagctgggactacaggtgcacaccaccacacctggctaatttttaaattttctgtagagatgaggtctcactgtgttgcctacccaggcatgtttccaactcctggcctgaacccattcgcctgccttggtttcctaagcccgcatgcagccctcatgaaagactgtgggctgtgagtccagatggcctgacttagaatcccctctgccacctgtgggtgatgttggggaagtggtcacagctctgtgcctcagtttcctcatctgtgagttgagacagcacaggtccctacctcataggatgtgcagtcagaatgtgaataacaataaaacattgggctaggcacacagtggctcatgcctgtaatcccagcattctgagaaactgaggcaggaggattgcttgagcccaggagttccagaccaacctaggcaacatagtgagacccctgtctctacaaaaaatttaaaaaataatcaggcgtggtggtgtgcacctgtggacccagttacttgggaggctgaggaaggagaatggctggagcccaggaggacaagaccacagacagctgtgatcccatcactgcactccagcctgggcgacagagcgagactctgtctcaaaaaaataaataaataaaataaaaagaccctgttttataaataaataaacaaaaaaaaattaaacaataaaagtactggggcatgatggatgtttaatatatgttacttgtcattactattaccagtgtgggagtccgttgactctctgagaatccaagcaaggaaacctctagctaaggacccctccgcctcttttatgagaacagggtctcactctatcacccacgcttgaatgcagcggtgtgatcttggctcactgcaacctccgcttcccaggctctggtgatcctcctgcctcagcctcctgattagctgggactacaggcctgtgccaccacgcccagctaatttttgtatttttagtaaaaatgaggtttcaccattttgcccaggctggtcttaaactcctgggctcaaatgatcctcccacctcagcctcccaaagtactgggattacaggcatgaaccactggacccggcctggacccctattttttttttttttttttgagacgcagtctcactctgtcacccaggctggagtgcagagtggcatgatctcagcttactgcgacctatgcctcccaattctcctgcctcagcctccttccagttcaagcgattctcctgcctcagcctcctcccagttcaagcgattctcctgcctcagcctcccgagtagctgggactacaggcatgtgccaccatgcctggctaattttttttttttttactttttttttttttttgagatggagtcttgcttgccctgtcacccatgcttgagtgcagtggtgcgatcttggctcactgcaacctatgcctcccaggttcaagcgattctcctccctcagcctcctgagtagctgggactacaggtgtgcaccaccacgcccggctaatttttgtatttttaatagagacagggtttagccatgttggccaggctggtcttgaactcctgaccccaggtgatccaccggcctaggcctcccaaagttctgggattacaggccgtgagctactgagcccggcccaggacccctatttttatggggccaagatgcctgcattctcttctgggaaggatcatcagccctgtgttcaaaagccatgatgcctgaatccagtttggggagagacagcaagtccctgtgttcatggggtcaggatgcccaggtctacttctgggaggaggacagttcgtgtctatttgcacagatgctcatgttgaggctggggtctcaaactagtggtccgcaggccgtccacgagtgcgttttcttgactctgtgcagtttcgtattttgagtgttaatgcctctcccacgggcgcacagcacagaggaacgataactccgacatgggttcaaatgatgaccttgagcaagcagcttctccgctctgtgcctcagtttccctcactgtccaaaagggatctgcacaggcaggaccaaaaatattgtgaagataaaatgagttcgtatttgtaacatacttagaatagtgcccggaggtagtaagccggatgtgaagtgctggtgagacaaaatagagctggttgactgcagacctaaaaccgtctcgtctccaagatcttgtctgccattctgggcaagcagatttcgcagcctggggagagggagttgggaaggacttaacttttcaccgcagggcctgagtcctggctttccgcggtggggaaggggtctcccgggtcccctcggtgtggccggccctgcaggccgggaggctggaccggggccgggtgggggctgggcgggggcgcgggcgtccgcagggtccgagcggccggcgcgcgtgtgaaggttaccgcttcccggcggggcgggggccgcgcgctgttgctggggtctgcggggcctgcctgcgcccgcgccccccctccttcccggccagccagtgagcggtacccgccgccgttgccaggggaaactcgccgccccgttacccagcaacaagcctggcccaaccaggcgcgaggaccccccaggccccgcccgccgctgcccaccgcgtgcccaatgccaggcgggcagagccggcccagctcccggagacggcgagcgcgctcattggccaccgccgcgtccgcccggatctgggggagccctcggcgcggggggcggggaaccgggccccggggagctgccgggcgcgcggcctgcaaacctgcgaccggctggggtgatacccgggctgtgcaccatccacctccctgctcccctgtcccgcactctcgggtgaggatgggcagttgggatgggctggaaacggggttgtgcattctgttcctacccccagaatggcaccctggagttggccttgtgccaccaagggtccccctcccacaaggagacctgagcatcctgactccgtgaagacagggactggttgtttcccgctcccccgctccccgccccgcaggtatcgtggctctggaacataacggttgaagttccctcccagaaaacaacccaggcgtcctggccttataaaaatagggtgtcactgcacccccaaaggacccaggcatgcctggccccgtgaaaacaaggagatgagccccctcctcttaggagatgcagatgtcccagccccgggacacaagaactcagggtccccccagaaggggacacagtcatgtctgatcccaggaaaactagggctgaacatcccactcccacaagaaacacggactcaggcctttgggctcccgaccctgagatgttacagagctcctgggcatcttggccctcaccacattgatgctgggagacactcctgtccctaacagtcaccagaccctcaggtgtccagtttacctaggtgggaccacctgcccagctccaaggtgcagacctgcccacttcccacccctctgagcccttttccccagggtccaggtggttgatctcccaggacgtgggcatctgacttcagagccgctttccttacctgttggcaccgaccccccaccttgcgccagggtcccaggcctcatagtgccaaggaccccagaagtccaagccccgtgtctctgattccccagacacctggccaagcgacccagcccctcacagtgatgtggctggggaggagggagtagtggagaggttggggggccctccccagtcccagacccccaggtctggaagatccagccctgcagcacctttacttggccccgtggatccagactgggagcccccagcctcgagagaccgtaacgtgcatggctgggccacttcagagaggcccaattcctcagtcccctccctcccgggagacccaaggcagagccgcctgcagctccagaccccagctccagacttggtgagcccaggtgcggcccgcccctaccctggtacctggcggggcggagttgaggattactcagcctccagaatgaggcgatgacatcatcctggggggggttgactaatggccgcgctggggggggcggggaagtttacccggtaacagcggctgccgcacggccccgcccccggggaagggctgggagggggaggcacagcctgcgctggcgcacacacaaacacacacacacacacacacacacacacacacagcgcatccctcccccaccgtcccacatctaacacagcttcctggggcaagggcaggggtgcgggggttgggtgtttgtgtgactatgtgtgtgtgtgctggagtcctctgtggatttgtgtcagtgtgctgttgtgtcagggggttcacacattacggtggggttgtgtcagtgtgtgctactgtgtgtcacttgatggattgtgtgtcagtgtgatggtgtgtgtcagcatgctacatttgtcacaatgctacatgtcatgggctgctgtgacaatgtgattgtgtgtcagtgtacaattgtgtgatgttctggtgtgctgtgtgtgatcatgatggtgtgatgtgtgtggttctgtgcagcatgctggtctggcagtgagatgtgtgtgcccatgtgattgtgtcctgacgctgggatcgtatatgtgtcagagtgatgttgtgttgggggaagatctgtgaaggtgctatgtcactgtactgttctgttgtcatggttggatgtgtttgtgtaatgctgggtgtcactggggttgtgtgtgtatgtcatggtgatggtgtgtacgtgtatacaatgctgtgtgtatatgggattgtgtgtgtcactgagtgtgtcagtggtacttgtgttgtgggtgttgggactgtgtatgtatcactgtgatagtgtatgcccatgtgctgtgctgggtgtcgggggaagatgtgcatacatactactgttattgtgtgtgcctggacaatgcggtgcacggtgggattgtgtgtgtgtgtgtgacattatgactgtgtctgaaatgcatatctgtgggactgtgtatcaccgacagtatgtgcatgtgcaatgctgtgtgttactgtggttgtgtgtcattgtggttgtgtttgtcagggtgatgttgtgtgtccatggaactgtgtgtctaatagattgcgtgtatgcaatattgtctctcactgtgcttgaatgtgtcactgttgcgattgtatcactgtgatctagtgagtgtgttgggaccaattggttgtgggatgagtgtcactgtattgattgtatgtcactgatactgtgtgtgtcagggtgatgttgtgtgttcaagggactgtgcatacctcatggagattgcatgtgcctgggcagcactgtgtgtgcctgtggttgtgggtctggggagtgctatgtgtcctgggactgtctgtgtcactaagttgtttttttgttttgttttgttttgttttttgagacggagttttgctcttgttgtccaggctggagtgcagtggcagcgaccttggctcattgcaacctccacctcctgggctcaagcgattctcctgcctcagcctcccaagtagctgggactacaggtgcatgccaccacactagagacggagcttcaccacattggttaggctggtcccaaactcccgacctcaagtgatctacccgcctcgacctcccaaaatgctgggattacaggcctgagccaccgtgccaggcctgagccaccgtgcccggctgtcactgatattttgtgtgtctctgtgatgctgtgtgtctgcgtgttcctgggacctgtgtgtctgtcgctgtgtgtgtcattgtgattgtgtatgtgcggtgggcgacgctgcttgtctctgggacggtgtgtgtgtgtgtgtgcgcgccgctgtgattgtatgtcagcgcgcttcgctgggtgtcgggggaaggtgcgcgtgtctccaggcctcctgcccgagaacagcggcgctgctctctgattggccgcggccgcgccagtgagaagctcccgaatcctgcggtaacttggtaacttggagactcggcccgcgccgcagccgcggggctccgggctgggggctgggagggcggggagggggaggggcccgccccgcccctccggggcccgccccgcccctccccgccccgatttcgcaggcccgccccgagcgcccctccccggccccctcgccccgtctccctcacctccagctcggcacctctgaccccctactttgactccatctcccacacccttgcgtcgctcctgactcccctatctctgccactcgctgggtctctctgtctctctctttcccatgtttatctctcctgtctctgtctccctgtagatctctctgcctttgtctctgtctctcatatcccctctctgtttcttccatctgtctctcccatcagtctccaccactgctgtctctccccgtctctgtctccgccacctctgtctctcctagtctctctccgctacctctgtctctgccatctgtctctatcatctctgtctctccctgtctctgtctccatcatctctgtctctcccagtctctgtctccatcatctctgtctctccctgtctctgtctccatcatctctgtctctcccagtctctgtctccatcatctctgtctctcccagtctctgtctccatcatctctgtctctccgtgtctctgtctcccccatctctgtctctgtcgctccatctgactctctcagctgtccctcctggattctgtctctctctctctccctcctctgcctcagtctccccacctttgtctcttcttcctgtcgtctctcccacctcttgtctctgtctctcccgcccccctctcccttccccgatgccctctctcttactcccacagccaggctcagaattcacttttcatccttctaagacagccagcggacggttcgctacttcgtcctcgcccctcccctccggcccaggcttctggcagcaggccccacgcagggcagacttcaggaaggacttcccgccctggttcggcacgagagctttatcgctcgggccaggcggaggccgggcggccccgtggcttccggaggcgcccgggcgggatgagctcactgcgagttggccaggatttcatcagcttcctcctgcggacttgcccccgctcctttcccggcccggccgcgcgggcgaatccgccggacgcctgctgcccccgagcggcagaaggcggaagcacaggcgccgcgcaaaaagcccacctttgcaccagacgatgtcgccagctcaggaagcctgcaaatacaaacccaattcatcctcacaaccaccaggggagatggactatacatatatatattttgaggcggagtctcgctctgtcgcccaggctggagtgcagtggcgcgatctcggctcactgcaacctctgcctcccgggttcaagcgattctccttgcctcagcctcctgagtagctggaactacaagcgcctgccaccatgcccggctaatttttgtatttttagtagaaacagggtttcaccatgttggccaggatggtgtcgatctcttgacctcgtgatccacccgcctcggcctctcaaagtgctgggattacaggcgtgagccaccacgcctggccccatttattcttatatccactcattcagcaattaccacagagtctcccctgtgccaggcactggtgcagttgtaggcatgaggatacagctgtgagcaaaatggatacaaatcctgccttcatgggactgacactctggtctgtggcagaccacacaccaggagaacacagtaacaatacaaagcgaaacttcaagtagaaaaaggaagcagggaagggccgtcaggagtgttgagggatggtgtctttgaaaaagtgctatttgccgccgggcgcggtggctcacatctgtaattccagcactttgggaggccgatgcagaaggatcatttgaggacaggagttcgaggccagcctggccaacatggcgaaaccccatctctaccaaaaatacaaaaattagctgggtgtggtggtgcgtgcctgtaatcccagctacttgggaggctgaggcaggagaatcacttgaacctggaagtgggaggttgcagtgagccgagatcacatcattgcactccagtctgggtgacagagcgagagtctgtcaagaaagcaagcaagcaagaaagcaagaaagcaaggaaggaaggaaggaaggagagagaagaaagaaagagagagcgagcagatgggattggctgaggtactggatgtggatgtgaaggacagagaggcgtttagggggcagccggaaggatgaaggttctgagagaccaattgtcatcatcatcatcatggcagctctctgagttcacctactgtgtgctaggctccgtgccgattcagagctttacatacatgacctggttacatccttatgaccatccatagatccaggaagcagagacgggagctgtggtaggattcaagatttttatacacatatatatatatatatatatatatatataggtttgtttgtttgtttgagatggagtcttgctctgttgcccaggctggagtgcagcggcacgatctcagctcactgcaacctctgcctcctgggttcaagcgattctcctgcctcagcctcctgagtagctgggattacaggcacgtgccaccatgcccggctaatatttgtatttttagtagagacggggtttcaccatgttggacagggtttcaccatgttggtcaggctggtctcaaactcctgacctcataatccacccacctcggcctcccaaagtgctgggattacaggcatgagccaccgcgcctggcccccttttttttttttgagatggagtcttgttgctgtgttgcccagggtggagtgcagtggcatgatctctgctcactgcaagctccacctcttgggttcacgtcgttctcctgcctcaatctcctgagtagctgggactacaggcgcacgccgccaggcctggctaattttttgtatttttagtggagacgggtttcactgagttagccaggatggtctccatctcctgacctcgtgatctacccgcctcggcctcccaaagtgctgggattacaggtatgagccactgtgtccagcctttttctttttttttagacagggtctcactctgtcactcaggctggagtgcagaggtgtgaacatggctcactgcagcctcaaccttccaggcctaagcaatcctcccacctcagcctccctcctgaatagctgggactaccttcttgtgccaccatggccagctaattttatattattttgtagagatgaggtctccccatggtgcccaggctggtctataactcctgggctcaggtgatccttctgcctccgcccccccaaagtgctgggattataggcatgagccactatacatggccttattttttttaagacagtgtcttgctctgttgcccaagcggagcagtggtgtgatcacagctcactgtaatctcaacctcctgggctcaagtgagcctcccacctcagcctcctgagtagctgggaccacaggtgtgtgccaccatgccctgctaattttttctttttaatttcttttatattttattctatttatttttgagacagagtcttgctctgtcgcccaggctggagtgcagtggcacaatctcagctcactgcgacctctgcctcttaggttcaagtgactctcgtgtctcagtctcctgagtagctgggattacaggcccgcaccaccatgcccggctaatttttgtatttttagtagagacagtgtctcaccatgtcactcaggctggcctcgaaccactccaggcctttttaaattttatattttattttgtattttatttattttatttttagagagagggtcttactatgttgcccagatgcccaactcctgggcttaaatgatcctccttcctcagcctcccaagtacctgggaccacaggtgcacaccaccacgcctggctaattttaaatttttttgtagagatggggggggggaggtctcattatgttacccaggctggtctcgaattcctggcctcaagcgatcctctggccttagcctcccgaagtgctgggactacaggcctgaaccaccgcgcctggcctctacctattcctttgtttagctgtttgttgtctgtcttctggagaaagtgagctccatggcggcagggacattctaattcccatttcacagatcgggaaactagaaggaggcccggcacaaagtaggttctcatgggttcaggtttgttgaatgaatatgcgtgtctgtttgtctcaagcggcagggagtgcgccgcaccgccccctggtggagagtgggaaacgtgtccgccggcgtgattatcaaatttcctgggagatcttcaagtccgcccttagccactgcgtactaacggtagaatttaactccattccacaaataaacacaaagtattttttatgattatttttgaacttgtaaaatttgttttttgatttcttgagaccattgtttaagctgtagcataagttacacacttctctaaagcctcccaattctttttttttttaggaacaaggtctccctcgccgctcaggctggaatgcagtggcacgatcagagctcattgcagccttgaagtcctgaagctccagactcttttttttgttttttgaaacgcagtctcgctttgtcgcccaggctggagtacagtggtgtgatctcggctcactgcaacctctgcctcccaagttcaagcaattctctaattctctgcctcagcctcctgagtagctgggatgacaggcgcccgccaccatgcccggctaatttttttgtatttttactacagacgggtttcaccatcttggccagggtggtcttgaaatcctgacctcgtgatccacctgctttggcctctcaacgtgctgcgattacaggcataagccaccgcacctggccctctttttttttttttttgagacagagtctggctctgtcccccaggctggagtgtgatctcggctccctgcaactctgcctccctgttccagtgattctcttgcctcagcccccggagtagctgggattacaggcgcacgccaccacgcccggctaatttttgtatttttagtagagacagggtttcatcatgttggccaggctggtctagaactcctgacttcaggcgacccacacccgcctcggcctcccaaagtgctgggattacaggtgtgagccaccacacctggccttttttttttttttaaagagtctcgttgtgtcgcccagtctggagtgcagtggtgtgatctcggctcactgcaacctccaactcctgggttcaagcgattcttctgcctcagcctcccacatagctgggactacaggcgttcgccaccacgcccggctaatttttttttttttgtatttttactagagatggggttccactgtgttagccaggatggtctcgatctcctgacctcatgatccgcccgcctcaacctcccaaagttctgggattacaggcgtgagccaccgcgcccagccttttttttttttttttttttaatgtatttgcttgtcgttaatgggatagtaataaggttgaggtttttgttaaggggagtttacttatcattaaactctgtagttactactacaaggaaactcttcccaagtacattaaacactaggttttataatatttgccacactgccaataaattctgttcacatattaagtatgacaagtccactatatgtaacatgtaagaatgctatactaggccgggcacagtggctcacacctgtaatcccagcactttgggaggctgaggcgggcagatcacgaggtcaggagatcgagaccatcctggctaacacgttgaaaccccgtctctgctaaaaatacaaaaaattagccgggtgtggcggcgtgcgcctgtagtcccagctgctggggaagctgaggtaggagaacggcgtgaacccgggaggcagagcttgcagtgagccgagatcgcgccactgcactccagcctgggtgacagagcgagactctgtctcaaaaaaaaaaaaaaaaaaaaaagaatgctatactggcagtagacctagggccagaataaattggcaagttttcattccatataaatgtgggaaaaaagtgagtacaacttttttttttttttttttttgagacagagtttcactcttgttgcccaggctggagtgcaatggtacgatctcggctcaccgcaacctctgcctcccgggttcaagcaattctcctgcctcagcctcccgagtagctgggattacaggcatgtgccaccacacccagctaatttttgtatttttagtagagacagcgtttcaccatgttggtcaggctggtctcgaactcctgacctcgtgatctgcccgcctcggcctcccaaagtgctgggattacaggcatgagccaccatgcccagccttttttttttttttttttttttgtgagaggaagtcttgctctgttgcccaggctggagtgcagtggcacgattttggctcactgcaacctctgcctcctgggttcaagcaattctcctgcctcagcctcctgggtagctgggactacaggtgtccaccactacacccggctaatttgtttgtatttgtagtagagacggggttttaccatgttggcgaggctggtcttgaactcctgacctcatgtggtctgcccaccttggcctcccaaagtgttgggattacaggcgtaagccaccgtgcccggccacatgaaatgtttaatgtggttgatctcagcttcattcacactgacttcagggagtctggttttctatgctcaagattgttctattgctgatttgccgttgttttgttttctttcaggatcaaggtgggtacttttttttttctttgagatggagtctcgctttgtcgcccaggctggagtgcggtggcgccatctcggctcactgcaagctccacctcctgggttcacaccattctcctgcctcagcctcccgagtagctgggaccacaggcgcatgccaccacgcccggctaattttttgtattttttttagtagagatggggtttcaccatgttaaccaggatggtttcgatctcctgacctcgtgatccatccagctccgcctcccaaagtactgggattacaggcctgagccaccgcgcccagcttttttttttttttttttttaatagagatggggatgggaggggtctcactactatgcccaggctggtgacaaacttctgggctcaagtgatctaccctccttggcctcccaaagtgctgggattacaggagtcagccaccgcacctggcccctcccaaactcttaagtgcagaactccatgtaaccagcacctaggtggagaaacagaacgttcttagccccatttcctgaccctgattaccctaattaccctcagggtaatcattatcgtgaattctaacaccagagattagttttgcttgttttagaatttcatataaatggaccatgaaatatgttctctttggtgtctgtatgcctttgttatgcagcctaatgtttgcaagattcatgcatgttcttgtttacttttccttttttttcctttctttctttcttcccccgcctcccccgcctccccacagagcctggctctgttgcccaggcttgagactcagcctcccaagtagctgggattacaggcccagtgccaccacgcccggctaatttttgtatttttagtagagacggggtttcaccatgttggccaggctggtctcgatctccctatctcaggtgatccacctgcctcggccgcccaaagtgctgggattacaggtgcgagccactgtgcccagccttgacttccttccttccttcctttcgagacaggggtctcactttgttgtcgctcagtctggcgttgaactcctggcctctagtgatcctcccaccttggcctccccagtgctggtgcaccactgcaccctgctgattgatcactttcagtgttgcagagtctttcactgtgtaaagacaggatcataactcactgcaatctcgacctcctgggctcaagcaatccttctgcctcagcctcctgagtagctaggaccatgtgccaccatgcctggctaattttattttattttattattattactttttaaaatatgctgactttagttatttacttttttttttttttaagatggagtctcactctgccgccaggctggagtgcagtggtgtgatctcggctcactgcaacctctgcctcccaggttcaagcgattctcctgcctcagcctcctgagtaagctgggatcacaggcgtgcaccaccacgcccggctaatttttttttgttttttgttttttgtttttgagacagtctcactctgtcgtcgaggctggagtgcagtagcactgtgttggctcactgcaacctccgtctcctgggttcaagcaattctcctgcctcagcctcccaagcagctgggactacaggcgtccaccatgacgcccggatagatttttcttttttttttttttcttgagacggagtctggctctgttgcccaggctggagtgcagtggcgtgatttcagctcactgcaagctccacctcctgggttcacgccattttcctgcctcagcctccctggtagctgggactacaggtgcccgccaccatgcccggctaattttttttacatttttagcagagatggggtttcaccatgttggccaggctggtcatgaactcctgacctcaggtgatccacccacctcagcctcccaaagtgccgtgattacaggtgtgagccaccgtgcctggccacgcctggctaattttgtgtgtgtgtgtgtgtacttatttttttgagacagtgtgtcgctctgtcacccaggctaaagtgcagtggcgggatctcagctcactgcaacctctgcctcccaaattcaagcaattcttctgcctcagcctcctgagtagctgggactacaggcgtgcactgacactcttggataatttttttttttttgaggtggagtcttgctctgtccctcaggctggattgcaatgacgcgatctcggctcactgaagcctccgcctcccgggtttaaacgactctcctgcttcagcctcccaagtagctgggattacaggtgcacaccaccacacctggctaatttctttttgcatgtgtgtagttttagtagagacgggatttcaccatgttggccaggctggtctcgaactcctgacctcagatgatcctcctgccttggcctcccaaagtcctgggattacagacatgagccaccacgcccagccgaggctgagtctttatcttggggactggcctgggcattggaaggtgttcaggagcagccctggcctctgtccactagatgtcaagaggaccctctcttgtgacaaccagaaatgtccctagtcattgagaaatgtcctttagggggcaaaattacctccattgagaaccactggataagaacacggagtttgaggatgcacaaaagggagtgatgtggctggagagggcagcagcggtgacacacacaccactcaggctccatcaagtcagctctccccagggtgctctgggcagcctctttctgtcagaacagttgccatagtttgaatgtgtccgtcgaagttcatgtgttgaaaacagtcggcagggcgcggtagctcacgcctgtaatcccagcactttggaaggccgaggcaggtggatcacgaggtcaggagttcaagaccagcctggtcaaaacggtgaaaccctgtctctactaaaaatacaaaaaaaagtagccagacatggtggcagatgcctgtaatcccagctactcaggaggctgaggcagcgaattgcttcaacctgggaggcggaggttgcagtgaggcgagattgcgccatcgcactccagcctgggcaaaaagagcaaaacctgtcttagaaaaacaaacaaacaaacaaaatatatatatatatttatacaaacacatacacacacatatatggagagagagagaggtgggggtcccactatgttggccaggctgaccttgagtgagctcctggccttaaatgatcctcccacctctgcctcccaaagtgttggaattacaggcatgagccactgtatttggcctaatttttaattttttttgtggagactaggtctcactctattgcccagactggtttcaaattcccgagctgaagtgatctgcccaccttggcctcccaaagttctgggattacaggcatgagtcaccgcactggcctcaagtgaatttcgttacatgcatagattgctatttggacaattataagaggattaagtttcattggtatctctgaaaggctgtgaacagtagccttagaaatggtaaggaattaccaggtacttccactttctatgtcttaaatcacaaaataaaatgactggcactacaggcaatctggtctgtccacttataactgtcattcaccttaactgagggtattctgtagcattcatcatcatttgtcacaatacctttattatttatttatttattctgagacagagtttcactcttgttgcccaggctggagtgcagtggctcaatcttggctcactgcaacctccatttcccaggttcaagtgattctcctgcctcagcctccccagtagcaggggttacaggcgtgagccacagcgcctggtcggcttgtcacactagctttattatgtctaagttttggttaatgctgtaacctcctggactctgcagctattcagctgctgttgctttgagtatcttctagttttgggaatgcaccaagctcattcaccacagggcctttgcataggttgtgtccttggcctgcacaggcagcctctcaccctccggcctctcctgcccctcttgccaggcatctcccacaggtgctgctatttcccatttacttgtgtcttcccttaggaggacaaggatggggtcagctttgttcatcatctcagttcccccaccaacttttcctcccagcacgcagcctggcagtcaatgctgatttgggagaatgaacgactgattctatcggttgaacgtttattttatatatatatatatatatatatatatatatatatatatatatatatactttttttttttttttttttttgagacggagtctcgctctgtcgcccaggctggagtgcagtggcgtgatctcggctcactgcaagctccgcctcccgggttcacgccattctcctgcctcagcctcccaagtagctgggactacaggcgcccgccactacgcccggctaattttttgtatttttagtagagacggggtttcaccgttttagccgggatggtctcgatctcctgacctcgtgatccgcccgcctcggcctcccaaagtgctgggattacaggcgtgagccaccgcgcccggccttattttatattttatgatttcatttacttatttattttcgatacggagtctcactttgtcgcccaggctggagtgcagtggcacgatcttgcctcactgcaacctctgcctcccgggttcaagcaattctctatctcagcctcccaagtagctgggattacaggcatctgccaccatgcttggctaaattttgtatttttagtaaagacggggtttcaccatgttagccaggctggtctcgaactcctgaccttgtgatccacctgcctcggcctcccaaagtgctgggattacaggcatgagccactgcgcctggccagttatttatttttttgagacgtagtcttgctctgtcgcccaggctggagtgcaatggcacgatctcagctcactgcaacctctgcctcccgggtttaagcgattctcctgcttcagcctgtagctgggattacaggtgttacaggtgcccgccaccatgcctggctaatttttgtattttttagtagagacagggtttcaccacgttggtcaggctggtctcaaactcctgacctcgggtgatccacccgcctcggactcccaaagtgctgggattacaggcgtgagccacggcgcccggcctattttattttgagacggagtctctcgttctgtcgcccaggctgcagtgcagtggtgcaatctcggcttactgcaacctctgcctcccgggttcaagcgatgctcctgcctcagcctcccaagtagctgggattacaggcgcccgccaccatgcctggctaatttttgtatatgtatattttttgagacggagtctccctgtgtcgcccaggctagagtgcagtggagcgatctcggctcactgcaagctccgcccccggggttcacgccattctcctggctcagtctccggagtagctcggactacaggcgcccgccaccacgccgggctgattttttttgtatttttagtagagacggggtttcaccatgttggcaaggatggtctcgaattcctggcctcaagtgatccgccctcctcggcctcccaaagtgctgggattacaagcgtgagccactgcgcccagcattttattttattttcgagaaggggtctgctctgtcgtctaggctgcagtgcggtggcatgatctcggctcactgcaacctctgcctccccggttcaagcgattctcctgcttcagcctcccgagttgctgggattacaggcgcgcgccaccacaaccggctaattttttttgtagagacgggatttcacaatgttggccagactgatctcgaacttctgacctcaggtgatccgcccgcctcggcctcccaaggtgctgggattacaagtgtgagccaccgcccacggccggtagaacatctgaagcttctaaagcgaactctaaggtttcattggcacgagggggctcgaaccacgccaggcttccaggcgtcagtgcccagtgcttggcatctactgatagaaaccaggaatgaggggctggaggcggaaacagcttgaagaaagaggtagaggccagggagtgaggacggtgtctccttttcctggaagttggtaattcaggcagaaggaagttggatgagcttgcggaacacccggggggccagtcggccccgctcccgcatccatcgcggaggcgcggcccctttaaggctcccggaaacggtcccacaggaccggaagtgaccctctttatttcccttcctcacgtggtgcaggcaggaagtgacgcgcctggcccgggagctgcggtcgcagaggccgacggagccggagtcgcggacgccgcggggtctccgggacaggtgacctgggggagggggccgggagcgcgcccagagaaggcggggcctgaagccccacgtggcggggagtgcgaacaggcccgggcggggtcggagttctctgcggggggcggggacaggacgcccacatgggaagctggaggggcgctggcggggcgggccgttgggtgggtgggcagggtcggggcggggcgtggccagagcctgggccggcggctgtgggcgggacctaaaagttgtggctggactgtgggcggggccatagtgttgcttgttcagctgtgtggcggggctcggacgccgggcggaagctctgtgggcggggccagaaagttttgccttactggaagtgggtccagattcttggccgggacgttgggggcggacccagaggctgacgcaatggcgggggcggggccacaatgtagtgggggagccagggggcggggccagggtgctggcggggaatgctgggggtggagccagaaagtttcgtctgagccacgggcgcggccagagcgttggccgggaggcggggaagcggggagttgagccagaaccctggggaagccatgggcggggccagatgctgacgcaacgaggtgtgggagggagtcagggggcgtgtccaggaggttggccaggccaatcggaggcggggccagagggttgactgggcaggccgggggcggggctggaataataataagagatggtaggggcgggtgtaggctgttgcctgcgagccaggaggcggggaaagagcgtggctgggaaagtcgggagcggggccacattaatggcccatgggtgggggcggggccagaagtctggcgggaaaggcggggccagaaagttttttcccgagccgtgggcggggccagagcggtttccaggatgtcggggacgtggccctggcattcccagccggattgaggctggagctttgcacagaaaatctggggcgggcctgggtagttttgtccttgttggggcgggtggagtattcagtggggcaaaacgccagttccaggaagcctcgccagtgagttctgggcctgtgtacagaatcctttcgggggaggcgggaggctgtcgaccttccgtagggcgctggagacgggactaggacgtccctgaggaaggcgcgggcttggaatgttctctgagagcttgggcagccaataagagtggggttcggactttctttgagcgtgggattgggaatgtttctgaaccttacctggtggagctagaatattcgcctggatatgagaggcaccaggatgagcacagggaggtgggtctggaactttcttttgcaggctggttggaggggttgtagttggaactctcttgagatagggaacccgggctaacactcataccacagggtgtggcggctggcctagaatcagcctttggaggagagcagtgttggatacttaagcagtgggtgggggccagaacatccccaaggtgggtttgactagatcgtttacatgggaactgggtgagtccacaaagatcatgaaagggctgagtctgaatttctatggagaagatggaggtggcagttgaaaggagggagagtgagggctacaattctcttggggtacagggttttttgtgtatggctgtgaggatcccgcagtatgttagagggtgaagtaggttggggggccattggcctttgtcctttttttccctctgtccccaggaaccctcagtgctgcgtctagattctgcaggggaggtttgctgggaccttggctccacgcagccagcgaaatggtgaggctgaaaaatggggtctctagaatctgagttttggggaagggggcttgggaggatgggatccataggggcagactctcagaccctgggggaaagtccctggtatggatggaggtttttccttccatccctcaactgcctcccggtctcaggcagccacactcgatttgaaatcaaaggaggagaaggatgctgagttggacaagaggatcgaggctcttcggcggaagaatgaggccctcatccggcgctaccaggtgccctagccccgccctgggagaccccatcccctctcttccccgcagtgagtttttctcacctctcccttccttaaaaccttttcatggctccccatcactgtcaggataaaggccaaaggccttagcctgacatcccttctttcattccattattcattcattcattcatttgttcacaaatattccccaagatctttaccagccccagtgctgagtggtgctggggatatagctgtgactgagacagacccaggcctgccccctccagggtccaccgtctagtcagggagacagccctgtcctcagggatgccccagagcagacaagtctggaatcaggaaattcaggggtctgtgggagtccagaggaggctcttgacccagccttggggatatcagggagggcttcctggaggagtggactctgaggcttgagtggtgagtagacaatagccagttgaaaaggcgaggggaacatgtttcaggcagaaagaacagtttgtgcaaatgttggaagcaagagagagcttggagcttcaagttggagggttggttaggagagaattgacctgggcaggtcagcaggggccaggctgtgctaggccctgaatgccaccaggatgagtttggactttgtcctgagggcactggggagccagggagagccttgagcaggggtgggaccggtcagaacagctctttaggaagacgcctctgggtgctgtgcggtggtgggtgcgaggaggtgatactggagcccagagaccaaggaggaagctggggctggaaccctagtgggagaggaggtacctggctcagggcagggctgttgagagggactcagttactgatgggcagttcagggcagggggaggaagagggaggatttaggacaaggctgctgagtaggtgatgtggctctccctgagatgggatctgggaggtggcatgggtttcatttattcattcttcatgtattcattcattttaaaaaaggcatattgaatttcccttgtgggccaggcagcgttctagacttgggatacacgtcagtgacatacatcactgaaagcagacagacattcctgtccccaggcagattctgccgtagtggaggaagcagacagtgagcgagacgcatatggtgctgggtgcaaatgggatgagaacagagagggtggcaggggagctggtttccacagggtgctcagggaaggcctcacgagaaggcagcattggagcagagacctacaggaggtgaggggttggagggtctctgggaaaagtgttcctggcagagggatccgctggcgcaaagcccctgaggcaggtttcagcctggtatgttgtgggaatagcaaggaagccggagtgatcgtggggagagggtgagagatgaggtcggggaggtaccaaggccagaccccacgggtcccacaggctgtggggaaggctgttactcagaggggcaccacaggaacgttctgagtggggctgcaacgtgctgaggtttgagggatatgagcggccttcttgttcagagtccaggagagaggcctgggctggggccagacttaggaggagttcaggggtctgggagtccgtctggcagacagggcacctgatgcttccctaccccggctgtctgctcctaggagattgaggaagaccgtaagaaagctgaacttgagggagtcgcagtcacagctccccgaaagggccgctcagtggagaaggagaacgtggcagtggagtcggtgagctcgtcactggggtgtgggaccctgaggatggggaggggcagagggttgaggcctgggacccaggagcccccagctgtcctgcaccagtgggtggcctccatcctggccgcatgcctccctgccccagtgactgtattttccccatctcccctcttccaggagaagaacctgggtccttcccggaggtctcctgggacccctcggcccccaggggccagcaaggggggccggactcctccacagcagggaggccgggccggcatgggccgagcatcgcgcagctgggagggcagccccggggagcagcctcgaggaggaggagctgggggccgtggccggaggggccggggccgaggttcacctcacctctctggagctggagacacctcaatctctgaccgtaaatccaaggtaggagctaggcagcgcctggagccctggctgaggttctctgttgtctgtttctgttttttcctcctctcagatgcacatttgtcctgtgtgtccatctttcagtatctctctctgagcctttgcatctggctctgtttctctcttcctccacctccttctcctcctcctgctccccctcttctagttccccctgttccttccctctcacgcctagagctcgtgtgtttttccttgtctctttctctcctactcctgctccccgtcttcttgttcctcctcgccttccttccctcccctctcctgcttagtgctgcgtgtccctccctgtccctctctgtctccctttttctcgctctctggtgcatgcttgcccactcatcctccgtccccatctctcctccctttctggcactgtgtgtctgtctggtgggctctctctatctggtgtgcttgtgagcacaggctctgtgtggcattctgtttctgtgtgtttctcttggtccccggctttggttatggggagcagtgattttactgtaactacctcactcacccctgacgtgcaggtcagcagggtgggagtctgtctagctgagtggcttacagcccaccgtggacatgggttgaatctggttctgtgagctacctggccttgggcagctcacttcccctgtgagcttctggttctagcacttacacgggaataagaaaattcaaaaattagctggacgtggtggtgggcacctgtaatcccagctacttgggaggctgaggcaggaggatcacttaaacctgggaggtggaggtcacagtgagccgagatcatgccactgcactccagcctgggcgacagaatgagactctgtatcaaaaaaaaaaaaaaaaaaaaaaaatgctgggcgtggtggctcacgaggcctgtaatcccagcactttgggaggctgaggtgggcggatcacctgaagtcaggagttcgagaccagcctggccaacatggcgaaaccccatctctactaaaagtacaaaaattagccgggtgtggtggcacacgcctgtaatcccagctactcgggaggctgaggcagaagaattgcttgaacctgggaggtggaggttgcagtgagccgagattgcgccattgtactccagcctggacaacaagagtgaaactccgtctcaaaaaaaaaaaaataattagacttaaattgggcatgccaagctgctgtcacacaaagactccaaaaatttcatgacctaagtggagtaggagtttatttctcccttgtatgctgagccctgcagggaggtgggtggtccagggggtgaggccctgctccatgatgtcactcagggacccaggttcctgctttttttttttttttttttttcttgagacagagtctcactttgttgcccaggctagagtgcagtggcatgatcttggctcactgcaacctccgcctcctgggttcaagcaattcttgtgcttcagcctcccaagtagctgggattacaggtgtgcaccaccacacccggctagtttttgtgttttcagtagagatggggtttcgccatgttggccaggctggccttgaactcctgacctcaggtgatcctaccgcctcggcctcccaaaatgctgcgatgacatgtgtgagctgctgcgcccggcctggttcctgtttttgttgcttggtggcccctaggtcctggtcattgtctgtggtaacagctgggttgccgacatggttgcggttcagttcacaggaaggggaaagataagtctgctttatcacttttggtcatgtcctgttggtgagaacttagacacctggtcatacctaacctcaaaggagactgggaaatgaaaacgttgtctacagctggctggctatttgcccatctaaaattttgtcactagcttggttactagtaacaagtagttactagctacttggaatgctgggtgctgtggtatgggcttgtggtcctagctacttgggaagctaaggtgggaggatcgcttgagcccaggagtttgagaccaggctgggcaacagagtgagaccccatctctataaaaattttaaaaattaactggacgtggtggtgtgcccctgtggtcccagctacttacttgggaggctgagccagcaggatcacttgggaggctgagcctgggaggtcaaggatgcagtgagctgtgaacacacaccactacattccagcctgggcaacagagtaagaccctgtctcaaaaaaaaaaaaaatcaataaatttttgctaccatggaaggaagaaggggagaacggattgtggttggtgggggtaggtcacctaaccatctgccaagtaattactgttattaccaccactatgattgcggcaaccttggtgtgccagggcccccagcaccctgacactgaactcgcaggttcagtggtttgctagaaagactcatggcttagatttatcacagtgaaagagatcacaaagcaaaatcagcagggggcggggtacctgggctgaggtctggaggaaacccggcatgaacttccaagagtcctttccctgtggagtcccaggggatgcgctgaattcctccagcactgaattgtgacaacatgtggcttaccagggatgcccacgagagattcagcactccaggtttttaattgggggctggtttatttttatttattgtatttatttagtttttaaaatttctttttgtttttgagatggagtttcactcttgttgcccaggctggagtgcagtggtatgatttcggctcactgcaacctccgccttttggtttcaagcaattctcctgtctcagcctcccaagtagctgggattacaggtgcccaccaccatgcccggctaacttttgtatttttagtagagacggggtttcaccatgttggccaggctggtctcgaactcctgacctcgtgatccacctgcctcggccttccaaagtgctgggaatacaggcgtgagccactgtgcccgacccgttatttttatttttattttattttattttttgagacagagtcctactctgttgcccaggctggagtgcagtggcacaatctcggctcactgcaacgtccacctcctgggttcaagtgattctcttgcctcagcctcccgagcagctgggattacaggcgcccaccaccatgcttggctaatttttttcgtatttttagtgagatggggtttccccatgttagccagcctggtctcaaactcctgacctcaggtgatccacccacttcggcctcccaaagtgctgggattacaggcgtgagccaccgcgcccggccacttttaaaattttttgtagagacagggtcttgctatgttgcctagtctggccttgaactcctgggctgaagcaatcctcctgccttggcctcccaaagtgcttggattagaggtgtgagccaccatgtcagcctggaggctagttttgaacgcaggccccttctgtctagtatgtactgaaattccagaccccccagtaggaaggcgaatgcagcgtacagcgtgttgttcgcatagtccaagcctggccagccagcctcatcagttcactgctgacctggagcacgctgagagcaaatggtcagatgccagcaggccagtccgaggagaggagcctcaggcctgctgggcagcccgtctcctgcaccggcagcttaatagttctccctgaagctgggtgtccctatctttatccccccaggagtgggaggagcggcgcaggcagaacattgagaagatgaatgaggagatggagaagatcgccgagtatgagcgcaaccagcgggtcagtggtgcgggtgtccccgaggcagggccgagctgcctgggctgcggggagcccgcgccaaccccctgctctgctgcctgcaggaaggggttcttgaacccaacccagtgcggaacttcctggacgacccccggcgacgcagcgggcccctggaggagtctgagcgggaccgccgggaggagagccgccggcacggccgcaactgggggggccccgacttcgagcgggtgcgctgtggccttgagcacgagcggcaggtgggtgttggcagtgaggacacctcggggctctcagggctttgatggggactgcatagcaggaaccagacagatcagggccatggggcctctccttttttgtgccacagcacaggactttttttttttgagacggattctcgctctgtcacccattctggagtgcagtggcaccatctcggctcactgcagcctttgcctcctgggctcaagcaattctgcctcagcctcccgagtagctgggattacaggcaagtgccaccacacctggctaattttttcgtattttgtagagacggggtttcaccatgttggccaggctagtcttgaactcctgacctcaagtgatccacctgcctcggcctcccaaaatgctgggattataggtgtgagccactgtgcttgcccaggattttaattattaaggatttatggtatgttttgtttcctgccaaggtaaatctcccctcattgttaatgacaccagcatttatgaggcacctaccacatggcaggtgctgtgtgaggggtggggacctggcctagaagaggaggcaggggcagtgtccttgcacttggtggtccacccctaaattgtccgtctgttggttcttctgtcagtaccacgtggctctagttgttacagctttgtggtatgtttgagggttttcttgttactaacagtattgtttactgggcacttactatgtgccaggtactgttttaggtgctgaggataagaggtttttttttttttttgagatggagtcttgctccatcgcccaggctggagtgcagtggcgtgatcttggctcactgcaagctccgactcccgggttcacaccattctcctgcctcagcctccccagtagctgggactaaggtgcccaccaccatgcccagctaattttttgtacttttagtagagatggggtttcaccatgttagccaggatggtctctatctcctgacctcgtgatctgcccgcctcagcctcccaaagtgctgagattacaggcgtgagccaccgctcctggctttttttttttttttttttttttttttttgagacagagtcttgccctgttgcctaggctggagtgcagtggcgcgatctcggctcactgcaagctctgcctcctgggttcatgccagtctcctgcctcagcctcccgaaaagctgggactacaggcacccgctaccacgcccagctaattttttgtatttttagtagagacagggtttcaccatattagccaggatggtctccatctcctgacctcatgatccgcctaccttggcctcccaaagtgctgggattacaggcgtgagccaccgcgcccggcgggagaagagtttggaggcagagcccctgccttgatgaggtttcttctggtgggagctgagtaaatgaaaatatagtgagatgtgaggtcctaccaagtgttgtggagaaaaatccagcagctgaggggacagagggatgctacttaggagatctgagagggcctctgtgaggaggtgccacctgagcctagttgattgtgatctctgccttgtcatcgcttccctgtgtgatcctgagcaagtggatgtgcctcggggcttaggggcggggtagggtgcgggacatcaccctgactccctgtgggctggggggcagggccgccgagctggcctgggcagtgctggagacatgacgttgtccatgacgggccgggagcggtcggagtacctgcgctggaagcaggagagggagaagatcgaccaggagcggctgcagaggcaccgcaagcccactggccagtggaggcgcgagtgggatgccgagaagaccgatgggatgtgagtctcctccccgctcctctccccatgtggcacgttgaccttggccctgacttctaagtcctatgcctctctctggtttttcctgctgtgtatgagtgagtgactgccaagtatcctgagatgccatggaccagctgctggagctcagcggcacgtgagagcatttctggttttcttttttttttttgagacggagtctcgctctgtcgcccaggctggagtgcagtggcgtgatctcggctcaccgcaagctccgcctcccaggttcacaccactctcctgcctcagcctcccgaatagctgggactacaggcgtccgccaccacgtccaactaattttttgtatttttagtagagacagggtttcaccgtgttagccaggatggtctcaatctcctgtccttgtgatctgcctgccttggcctcccaaagtgctgagattacaggcgtgagccaccgcgcgcggccgagcatttctggttttctttttgtttttggagacagagtctagctctgtcgcccaggctggatggagtgcagtgggaggatctcagctcactgcaacctccgcctcccgtgttcaagcaattctcctgcctccgcctcctgagcagctggggtgagaggatttcttctgtgttcatgggtatgctgggctgagctgatccaggctggacgctaagctgtgggtcccgctgggcttggcttcttgcagcagggtgaattcactctgcgccagggtgttcattctgctgtccaggctgagggcagcagctgcctggggagcgcttgccctgacatgggcagatgcacaagcaggcacacttcccagttgtgttcgccagcacaccccgcctcactggggcggggaaataagctctgccccctccagtggataggaacaccggtggcggcagggacatcagttccaacgcagggagggcatgaaggctgtttaacagcgattagacctttgcatcctcctgccagcctctgacctgtccccagcaactcagatccctgaatgtctccatgcctcaccgtcacctttttttttttactttttttttgagacggagtctcgcactgttgccggggctggagtgcagtgatgtgatctcggctcactgcaacctccgcctcctgggttcaagcgattttcctgcctcagcctcctgagtagctgggattacaggcacgtgccaccacatccagctaattttttgtaattttagtagaggtggggtttcaccatgttggcctggctggtcttgaactcctgacctcatgattcacccacctcagcctcccaaagtgctgagattacaggtgtgagccaccgcgcccggcaccaccaccttcttaacccagtggcattgttaacctcaagtttgactttgtcccccgattcagtcagacttaaagcaaagccctcattgcatcatcgtcatggggaccaacttccataaccaagaaggagaaggttctggaagagccgataaatagcagtatttaaagatcagcaactttaggttttacctcatcccccattctttcctgtgttgaaagttttcattcacctataacttgttttttggctttggctaaggaggattttgtctgtttgcccagtggtcgggaagcattttgttgtggattgtgaaccaagcctgtgcgagtgtgagaaataatttgcacagatactatagctgatcttcctaaggaggaggcagctgggcttttggggagatgttctcagcattcacaatgagaaagtatttgtttttcttatgtgtcctaaaagcagtttgcaacaagtctgatgaataatgtttgtgtgggccgggtgcagtggctcacgtctgtaatcccagcactttgggaggctgaggcaggtggatcacgaggtcaggagatcaaaaccatcctggctaacacggtgaaaccccgtctctactaaaaatacaaaaaattagccgggtgtggtggtgggcgccctgtagtcccagctactcgggaggctgaggcaggagaatggtgtgaacctgggaggtggagcttgcagtgagccgagatctcaccactgcattccagcctgggcgacagagagagactccgtttcaaaaaataataataataataataataatgtgtgtctgggccaggcgtggtggctcatgcttgtaatccccacaatcccagcactttaggaggccaaggctggaggactgcttgaacccaggaggtttgcagtgagctgttatgatgccactgcactccagcctggaccacagagcaagaccctatctctaagaaaaaaaaatgcatggtgtcttgctttcatcagcatatatttgagtcctcctctatgtcatggaaggttctaggtgatacagcagcaaacaaaacatttctgcctttttggaactaagagtgtagtgggcaaggtgggtaattaagaggtctaatgttaggcccagaaggataatgatgcagagtaagcagccagggtggaggttagaattttagacttagataatctgtgtaataatattatctttttttttttgtttttttgagactgagtcttgctgtgttgcccaggctagagtgcagtggtgtgatttcagctcactgcaacatcgcctcctgggttcaaataattctgattcagcctcccgagtagctgagattacaggtgccagccaccaagcccggctaatttttgtatttttagtagagatggggtttcaccctggtctcgaactcctggcctcaggtgatccgcccacctggactcccaaagtgttgggattacaggcgtgagccaccgtgcccggccctaatattatcttagctgggggttcaggaaggcctcttagcagagccctgaaaggaggtgagggagtgagccagtgaaaaacgtgggaagaacgttccaggagcaggcgctaaggccctgaggcaggagctaggtgtggtggaagagcctgcttagctggagaggtgagggagactggtgggaaaggtcagatagggagttgtgggtcatgtacttgggcaagggtctgtggtgatccccccaaatttttgttttggcgcccacattctgaatctttttgtatttgtcactatgctgtcaaatttgcctcttgcccatcacctggtcctatcctttgttttttttttttgagatagggtctccctctgtcacccaggctcgagtacagtggcttgattactgctcactgcagccttgacctcccaggctcaagtgatcctccctcctcagcctcccgagtagctgagattacaggcacgtgccaccacgcccagctaatttttgtattttttgtagaggtggggcttcaccatgttcaccacgctggtcttgaactcctgggctcaagcgatctgtctgcctcggcctcccagagtgcggggattacaggcttgagccaccatgcccggccctgtcctacttctagtgtcccctgtctggttgaccgtctgtctctgatccgattcctgaccctgacctctcccatcttcttgatcctcttgttaccctgttcccccagctgcccgctcacccgttatctttcccccaggttcaaggatggcccagtccctgcccatgaaccatcccaccgctatggtgagtgggtgcccttggatgagctgaggctcggtctgggagtcaggggtggtgtgtgccacaccttcccttcccaatgacacctgggttctgttgcagatgaccaggcctgggcccggcccccgaagccccctacttttggggagttcctgtcccagcacaaagctgaggccagcagccgcagaaggagaaagagcagtcggccccaggccaaggcagcgcccagggcctacaggtggggcaccccttctgcgggcttgcatacccccagggctctccgcagggcgttctcttctttggcttgctgtgaaggtgtgggtacatctgtctgtccctgtctttgtcttggccctgtctatctcgcaggtccgtggtttgaggggcttgggatctggctcttggttttaccctcatctgtcccctttctgccgtcacccatctcctctcctgctacctgccccactttcgttctgtccttgacacatggggacacacatccgccattccctcagccctccaccatgccagatgctctgggcagctcctccctagggagggtggaggcaggaagccccttcctcctgtctactctccacccaggcatcacccctccctctgttccctctagtgaccatgatgaccgctgggagacaaaagaaggggcagcatccccagcccctgagactccacagcctacttcccccgagacttcccccaaggagacacccatgcaggtgaggctgggctgtggttcagggcacgggcctggggtgggggctcaggacctgtgccttgccctgacttgcctgtgtccccaaagccacccgagatcccagctcctgcccaccggcctcctgaagacgagggggaagagaatgagggggaagaggatgaagaatgggaggacataagtgaggatgaggaagaggaggagatcgaggtggaagaaggtgatgaggaggaaccagcccaagaccaccaagccccagaggctgcccccaccgggatcccctgcagtgagcaggcccacggagtccccttcagtccggaggagcccctgctggagccccaggcccctggcacgccttccagccctttctcaccacccagcggccaccagcctgtgtccgattggggtgaagaggtggagctgaattctccccggaccactcacctggctggcgccctctccccgggtgaggcctggccttttgagagtgtatgaagctggctgcctgtgtgtgtgtgtgtgtgtgtgtgtgtgtgtgtgtgtgtgtgtgcgcgcgcgcgcgcgcgcgcgcgcgcgctagaggggtgtggctggtgggggacccttggggctgggccctgggacccagtgtgccccacagccctgtcagctgagggggtagcgcagcccatgctcttctgtactgtcatgcccgtctctggaatgtccactcccagagcctgccccagcccttcgagccccctccccaataaagaattcacatcctccaatgacattcccccaggtgtgtccttgaacccccttcaactccccctgggccttctctcttggggtggggagatgtcaggcgggaaagggggcttgactggggctccccttccctaggaggtggccagtcagcccctgccttcccggagagtgggcccagcctccgaggaacccaggaagctgaagaggaagggtctgaggcaactccaggtgggggagtgcatggggcatgggatggaggccgctgcttcctctttctctggggctgaggggcagagggcttggggggagtggggtgaatgtgtgtaggtagcagttggaccatagaggtgaggtgaaaagggtgagctcggatagggatggggggctggagccgggtggcaggggtggggcaaaggggcaactttatgggccaagccaataggaatttggtatggaggttgaggaggtggggttaaggaaaggattagaattttggagtcgagctcaggggttttggaaagcactggtttaagagtaatggggtgtggatcggatgccttggctcatgcctgtaatcccagctaattgggaggcgggaggatcgcttgaacctgggaggcggaggctgcagtgagccgagatcgctccactgtactcccacctgggcgacagagcaagactccgtctcaaaaaaggtggttggcgttggtgtactagggcaggagctataggcagactacgaaatttgaactggctcgaaaaggccaaagagatgggcaagggcagaaaactggatttaactgtggctgggattagagttccgaggtgcaacctagtggggcaaattagaatagacatgcgtacccgatcagcattttgggaccgacgaagtgcgagcaagaggccaagcccctctccacctacactccgtaggagtaagatttcgaatctcagatggcctccccttcccccagagtgggattaggattttgggggcagagccaaggaaggactggttagaatagcaggcgttggcgaaggaaaggggagggcgggtcctctaggactggcttggtggaggttgatgaaggccgtgagatggggcgggggtgggagaggacagtttgcagccttgggtggcgcgggggcccagaccctctgtcttgggccacttgttggtcgggagccagatctcgccacacccgcgtttcctcgattgtaaacggttatgttgggagtgtttgctgctgcgtgggtccgctgagaggattagtctgggccccgtaaaccgcttagcgccgagcctgctgtggcaagggctcgaactggatgagagacgtggctagacgggggaggggtgctgggccgggggggaggtgggaagactgctcccctccgctgactcagccccttctctcctcagaggcaggccccgaaggccaggagacggcggagatcaccgacttccagagggtgcgtttctgcaaggtggtggcggcccctccgctgccgggggccgctcgctgaccgcgcccgccggaccgcggcctccgcgctctgcactaacctcccaccgcctcgctcctctgtcctctgcttctgccacactccagccaggagagggttaaatctaaggggggaggagccagggtctgcgagccgggcggggccagggcagtagtcgggtgcaggccccaccaacgggggacgtcacggcactgggacggctgggacgcttccgcgttagtctcccatggaggccctgggcggctcgagccagtcttcaggccgaatctcccgcctccaggattgcatccgaggcctggcagccggtgacacttccgaagggcttgaattactcgggcgccagccctgtcgtattaaacgcagtgcttccgctcacccttgaactgtgtttctggagggggcaggctgggtcgctgtgcttggcgggcttttctgtggcggaagaggcggaaggaaggggtcttcctccacccttctgatccgtcttccctcccccctcccgcaggcctccccgaattcctgaagacgctgctgggaggggactgaagcttccccgccttgatggggagggggcgtgaggaggggtttatctggatttccaggctgtgttctttctaccccagagcctagtctggaccccttggctctagggagagggaaaagctgaccgttggggaggagctgggagaaggggcgcgattgcggtgaggggcggagctggaacctcggggcctgaggtgctgaggatacctgaaagcgggctgagagtgtgctggaggaggcgggtcccgcgggggcggagctaggctgcctgggcggggccggaatcctgacaggcggagttagagcggggggcggggtcagcgcgcgcgggtggggctctggccatgggcatggggcggggccgtcagcgggggcgtggtcggggtgtcgcgcgggaacccgcgcgggaggagagcggggattccggaactagagtgtgggagccagaggccgtagcgggcagggctcgagcactggagtagagcagtccgacaggtagagaagtgagactggctgcggcacagggcgggttagggctccaggcagggcttgagcgggacgagggggcgggctccgaggcgggctagatgcctgggctggatgaagtccgagtctgggaagagaaccgtgttgtggcgggaggaggcggtgattggggtggtggggctaagcgcgggggcggggctggagcgaggggggcggggtagcacctccgcctgtcggtggtggggcggaggctggagggggtgggcctaggatgcggaggcggcagctcgcgtgggggcgtgaccatgctggcgggggcggggccggaggcgggcggtttagagagcggggcggtctgcggggtgggggcggggcctggtgggggcggggcctgtgcggtctgcggcgcggagccgagtgggctgcggggatgcgggggaccagctgcgtgggcggcggcgccgagagccccggaggcgcggggctgagcgagggcccgcgggggcgctggctgcgcttggctccggtatgcgcctacttcctctgcgtctcgctagctgccgtgctgctcgccgtgtactacggtctcatctgggtacccacgcggtctcccgcggcacccgccggcccacagcccagcgcgccgtcccctccgtgtgctgcccgcccgggcgtgccgcctgtcccggcgcccgccgctgcctccctctcctgcctcctgggagtccccggcgggccgcgaccccagctccagctgccgctgagccgccgccgccgctacagcgaccctgaccgccgtccgagccgccagacacccagagagacgccagaggccgcggaggggcgaagacccgggtaactctcccttccaccccaacccggatcgccagccctcgagagctctgtgctccacgccgaggatgcaccgtctctggattggtccggccttcttcctaatgacatcgctcagcgtctctggagccgtcatcccgcggaatgggggcccagggggtgtcagctcggggccttgcctcttgcagctactctgtggtcaggccgggtcctccaccatcaggaagatcccatcctgagctctgtctcctgcccctcctgctgtgggatgctgagcacagagcccacagcccatctgcctcttcacctccctgaatccgtgtccatctgcaataaacgacagcctcggctgcctcgtgctgtgtctgtcctgttgtctgcagagatgcctcccctcccaagtttgtgtgggaaagaccttcctggggtgtggcctttgtctgttttgtcccgggtgggctgttccccttccttaaggagctcttcttttcttggagtagggagaagcagcttagcagcagcagggcctttgaaggtcagacagtgggaagggcttcccagttttttgtgtgcttggagcaaaggacaaatgtctctggggagaagcagagtgtctgccctcgtgttacagcacaggagacaagaggaggggtggggtgatataggacaatagctggggttctgggaattgctgttggtgtaattatcatgtcagggacagaggctgaatcacccagggatctcagttggctgccgagagggaacgatgctggcccacttcctggggtcagagagatgagagtggatggcggcggcggtggtgttgcttctcagcctgtctggaaatctcagagccaatgaccaaagcgctgtgctgccttggaagactggtgcagcctctggcctggggcgctgctaggaaaccaaggccgggaaactgaggtctagcttctgggcaaggagtccgaggtggggaggccatgttccatcctggaagactgaggcctggctctggacagggcctgggatctgacatgcaggaagctggttcctgtccagcctccccgcttgagctggaggccttcccaggagagtgaggctgagcatcttctcccacgctgtggctcctggagatctgtggaggtggttaggaaggtcagctgctctgctcacctcccctttaccccaccaccactccccagagggtggttgtgaaggggaatctaggaagccagcacttctttgtagtcagcataggtgatagttaggggcactgactggggcgagactactcgggttcaaattccagctcctctcattacaaactgtgtgactttgggcaggtcacttgacctctgtgtttctttttttttttttttgagatggagtcttgcactgttgcccaggctggagtgcagtggcatgatcttgctcactgcaacctccgccttctggttcaggtgagtctcctgcctcaacctcctgagtagctgggattacaggtgcccaccaccacacccagctaattttttttttgtatttttattttttattatttttattttgagagaagtctcactcttgtcccccacgcttgagtgcaatggctcgatctctgctcactgcaacctccacctcccaggttcaaacaattctcctgtctctgcctctcaagtagctgggattaaggcccctgccaccacgcctggctaatttttgtattttttagtagagacgcggtttcaccatgttggccaggctggtctcgaactcctgacctcgtgatttgcccacttgggcctcccaaaattctgggattacaggcatgagccaccacacccggcctctgtttcttttttttttttttcttttgagacggagtcttgctctgtcgctcaggctggagtgcagtggtgcaatgtcggctcactgcaagctccgcctcctgggttcatgccattctcctgcttcagcctcctgagtagctgggattacaggcgcccgccaccacgcctggctaatttttgtatttttagtagagacgaggtttcatcatgttggtcaggctggtctcaaattcctgacctaaggtgatttgcccactttggcctcccaaagtgctgggattacaggcgtgagccactgcacccagccttataacttatttaaaatttttaagcattttttgtttgtttgtttaatagaaatggggtttcacactatgttagccaggctggtcttgaactcctgggcttaagtgattttcctaccttggcttcccaaagccctggaattataggcatgagccactgtgcctggccctgcctctgtggttctgtagaatgaagatgctaatggtacttcttcatagacttgctctgaggaataaataaactggtgatctcaagccctgagaacgatgtcacatgttctctctctccaccacctctgtccctcagggtttaaaagccccagctgggatcctctggggatagcaagtcagtccaaagccctggccaccagcaaatggtgagtttgagggaggggcctctccatttcggttcccactggcccccctctctttggttttcatctctcttctcccagccccattttttcctactctttcgtttccttgttgctgtgtgtcctggctcttttctctttctgtgtttgtctctctgcgtctcagtctttctgtgtcctgtttatctctctggtgtctcttggtattgtttctctctcccactctgtatgtctctgactcattctgctcattctgtgtcctccctattgctctctgtccccagctcgttcttttttttttttttttttttttagatggagtcttgctctattacccaggctggagtgcagtggcggtgggattacaggcgcccaccaccatgcccgtataatttttgtatttttaatagagagagggtttcaccagagtggccaggctagtcttgaactcctgacctcaagtgagcttcccgcctcggcctcccaaagtgctgggattacaggcgtgagacactgtgcccagccccagctgattctctttcttctctcctccacacttatcttaccccaacactttcttccaccttgctccccttcccctgcccccgcaccccacagcttccaggtccctagtctcagtgtcccctgtctccttccctttatctcttccttttctcctcctatttctcttggtttctcttttggtctccattgtttaatcttccttttaacaaatattttttgaggctgggcacagtggttcttgcttgtaatctcagcactttgggaggccaaagccagaggatcacttgaggccagaagttagagaccagtctgtgtaacacagcaagacttcatctggacaaaaaattaaaaaattagctgggtgtggtggtgcatgcctgtagtcccaactactcaggaggctgagaggagaggattgcttgagtccaggaggtcgaggctgcagtgagctatgattgcactacttcactccagcctgggaaacagcaagatcctgtctctaaaaaactaaaaaaacaacccacccaaaacccacaattattttttgagcatctgctgtgtgccaaagcttattttaaacactggagacacaggagtgaataaaacaggcaaaaattcctgctctcggctgggcgtgatggctcatgcctgtaaccccagcactttgggaggccaaagcaggaggatcacttgaggtcatgagtttgcgaccatcctgaacaacatagtgagatcctgtctctacaaaaaatacaaaaattagccgggcatggtggtgcatgccttgtagtcccagctactcgggaggctgaggtgagaggattgcttggaggtcaaggttgcagtgagctgtgactgtaccaccgcactccagcctgggcaagagagcaagaccctgtctcaaaaaaaaaaaaattcctgctctcaatggaactgaatattagtgggaacacagacaagaaattcagttaatagccgggtgcggtggctcatgcctgtaatcccagcactttgagagacctaggagggcggatcacctgaagtcaggagttccagaccagcctggccaacatggtgaaaccccgtctctactaaaaatacaaaaattagttgggcgtggtggtgggtgcctgtaatcacatctacttgggaggctgaggcaggagaattgcttgaatccaggatggggaagttgcagtgagccaaggttgcaccactacattccagcctgggtgacagagtgagactctgtctcaaagaaaaaaaaaaaaaattcctgttcttaatggaactaaatattagcggggacaaagacaagaaatgtgattcataactttgagtgaaagcagggtaagggtgatggggatgatggagggtgtggttactgggtagaagcccaagactggtgagggtgaggctggcaggtctctgggggctgagggaacagtaagtgcaaaaaccttcggggtggtgtgcctggcttgttgaaggaatagcgaagaggccagagtggctgaagcaagagggagtggggagagcaagaggaggaggtgaggcaagagaggacaggcagcttgatcagggcctcatggaccacagaatgcaattttttttttttttttgagacagtcttactctgtcacctaggctggagtgcagtggcgcgatctcggctcactgcaaccttcatctccctggttcaagtgattctctcgagtctcagcctcctgagtagttgggatttcaggcacgtgccaccacacccaggtaatttttgtatttttagtagagacagggtttcgccatgttgctaaagctggtctcaaactcctaacctcaagtgatccacccgcctcagcctcccagagtgcggggattgcaggcgtgagccactgtgcccggccacaatgtgcactttggatgaggtgggagccatgggaggcttctgaggtgaggagggtgtgcgctgattcagatctcaagaccttctgactgcgatgtggagaatggactgcagggggcgatggtggaagccaggagcccaatgaggacaccaccgccctggttcaggtgagagaccatggtggctgtgctagagtgttggctggggaggaggggagaagtggtcaaaaatccgtgtgtgggctgggtgcagaggctcacacctgcgatcacctcccagcaccctgggaggccaaggcaggaatatcacttgggcccaggcgttcaagcccaacctgggcaacatagtgagaccccgtctctacaaaataaaaataaacttttttttttaaaatgaaaaaagtaaaagcaaggcatggtggctcatacctgcaatcccagcattttgggaggctgaggctggagaaatgtttgagctcaggagttcaagactagcctgggcaacatagcgagaccccatctgtacactaaataaaaaatcagccaggcgtgatggcttgtgcctgtagtcccagctattctggaggctgaggcaggaggattgcttgagttaaggagttgaggctgcagtgagctgtgattgtatcactgcactccagtctgggtgacagagtgagaccttgtctcaaaaaaaaaaaagtgtgtgtgttgtgtgtgtatactgataaaaatacacatagcataaaggttaccattttaatcatcttaccatctttttttttttttttgagacagagtcttgctctgccacccaggctggagtgcagtggggcgatctctgctcactgcaacctccacctcccaggttcaagtgattctcctgcctcagcctcctaagtagctgggattacaggtatgtgccaccatgcccggttaatttttgtatttttagtagagacgaggcttcaccatattggccaggctggtctcaaactcctgacctcaggtgatccactgcctcggcctcccaaagtgctgggattacaggcatgagccactgtgcctggcccattttaactgctttaaagtgcacagtttcgtggcactaagtacatttacagtgttgtgcaaccatcaccaccattcatctttaaaatgttttcgtcttcccaaaatgaaaccccgtacccattaaacaccatctccccattccccctcccctcagcccctggcgagcactcatctactttctgtctatataaatatgcctgttctggacattttatataaaagcaatcataacatacagggccttttgtgtctggcttatttcacttgagtcatgttttcttttcttttttttttttttgagatggagtctcgctctgtcgcccaggctggagtgcagtggcgcaatctcggctcactgtaagctctgcctcccgggttgatgccattctcctgcctcagcctcctgagtagctgggcctacaggtgctggcgaccacgcccggctaattttttgtgtttttagtagaaacgaggtttcactgtgttagccaggatggtcttgatctcctgacctggtgatccgcccgccttggcctcccaaagtgttgggattacaggcgtgagccaccgcaccaccgcacccggccgcagcgtcctgttgtcaaggcttttctgggtgaaagcaagtatcagtgcttcattccttgtttttttttttcttttttcttttttgagacggagtgttgctctgtcaccaggctggagtgcagtggtgcaatctcggcttactgcaacctctgcctcccaggttcaagtgattcttctgcctcagcttccctagtagctgagactacaggcgcatgccaccacgcccagctagtttttttgtgtgtttttagtagagacggggtttcaccatgttagccaggctggtctcaatctcttgacctcaagatccacctgcctcggcctcccaaagtgctgggattacaggggtgagccaccgtgcccgcctgcttcattcctttttatggctaaataacattccattggccgggcgcagtggctcatgcctgtaattccagcactttgggaggccgaggtgcgtggatcacctgaggtcagaagttcaagaccagcctggccaacatggtgaaacccagtatctactaaaaacacaaaaattagccaggtgtaatggtgcacacctgtaatcccagctattcaggaagctgagacaggagaattgcttgaaccaggaggtgtaggttgcagtgagctgagatcgcaccactgcactccagcctgggcgacagagtgagactctgtctccaaaaaaaatttccattgtatggataggccacattttgcacattttgtttatccgttcatttgttgatagacagttgggttgcttccaccttctggctattgtgaatagtgctgctgtgagcatgcatgtacaatattttgtttgaacttttttttgggcagagtctcgctctgttgcccaggctggagttcagtgatgcagtcatagctcactgcagcctccaactcctgggctcaaacagtcctcctgcctcagcctcctgaggagctgggactacaggtgtgcgccaccatgcctggctaaatttttatttttttgtagagacaggatctccctatgttgtccaggctggttttgaattccagggctcaagtgatcctcctgtcttggcctcccaaagtgtaagagattacaggcatgagctaccatgccccgcctgataatctgtgtttcatttatggaggaactaccaaacaaaatctgtatatatatatatattttttgggacggagtttggctcttgttgcccaggctggagtgcaatggtgcgatctgggctcactgcaacctccgcctcccaggttcaagcgattctcctgcctcagcctcccgagtagccgggattacaggcacgcaccaccacgcctggctaatttttatttttagtagagacagggtttcaccatgttggccaggctggtctcgaactcctgacctcaggtgatccacccgcctcggcctcccaaagtgctgggattacaggcgtgagccaccacgtccactatgcccagccctgaatattcacattttttgctgcaaaaatattaccacgtctgatgggagagaagggggcgcctgcatcaggcctctgagagtgttacataatgcatggtattcactcaaaattgcctttctaaaattggaacaattctgagttctgcaactcatctgtccccaaggactcctgctaagggcttgcggacctgtaatttggcccactgccaaacctagattcatcttaattatttgctcaacatttatttaatggctcagggaaaaaactaactttctggtaattttttaaaagtagagaatgacgttcatttagtaagttcccattgtcaatgacatgctatttttagtgttgtgtggttaggcgaatgcgtgtttgtgtttgtgacggcctggatgagtgtgtctgtgcatgagggtgtggtttttgtgtgactgagtgtgtatatgtgagtgtgagtatgtaagtgtgaatgtgtgtatttgactgtttcagtgtgcatctgtgtgattgggtgtataaaagtgtgtttgctcctctaatcgcagcactttgggaagccgaggtgagaggattgcttcagctcaagttcaagaccagtctgggcaatatagcaagaccaagtttctacaaaacattaaaagattagcagattagcggggtgcggtggcgtgcacctgtggtcccagctacttgggaggctgaggcaggaggctctcttgagcctaggaggtcaaggctgcagtgaactgtaattgcaccgctgcaatccagcctgggtggtgacagcgaggacctgtgtcaaaaaagtatgcgtgcatgtctagttgagtctgtgtgtgattgtacattgagtgtgactgtgggtctgtgtgtgtgtgtgtgcatgtgtgagaacgtgtatgagaagaggcatggtgcagggtttaaggtttatatactgaaagaaagttctcatttcaggcgacatctgtgccctctgctattagaatttcagcggactccacaaaatcagcaaagaaatagtgtgctgtcaatcaataccctttttgtccactagaggtcgcctgtctactttgagcagaggaaactaatctatatttttacatttagttgctgggagtttgcagacacttccagagatgtgggaggtaggagtgtggggatgagaggtggagacgtgtgtgtgtgtgtgtgtgtgtgtgtgtgcgcgtgtgtgtagtttagctattgcctttactcacctcagctgtacatagagcagcgatcctcaaacttactagtctcaagactctttcattctttcttttttagacagggtcttgccctgttgcccaggctggagtgcagtggcctgctcatggctcactgcagccttgaactcctgggctcaagcgatcctcccatttcagcctcccaagtagctgggaccacaggcatgcaccactatgtctagctaatttttaaaatatttagaagagatggggggtcttgctatgttgccaggctggtcttgaactcctagactgaagccatccacctgtatcggcctcccaaagtgctgggattgcaggtgtgagccaccacacctgggtgagatgaatactattataaaagagcaagttcagcccccttttgcctctttgcctttctgctctctgctatgtaaagataaagcattcctgctctgtggagcaggaattcaaggaggtatcttggcttcagaatcacccaacctgccagtaccttgacattggacttcccagcctctagaaccatgagctaataaatttctctttataaattcaaggaggtatcttggcttcagaatcacccaacctgccagtaccttgacattggacttcccagcctctagaaccatgagctaataaatttctctttataaattacccaggctgtggtgttattttattttttatttttatttatttatttatttatttttgagacagagtctcactcttgttgcccaggctggagtgcagtggcgcaatctcagctcattgcagcctgagcctcccgggttcaagcgattctcctgcctcagcctcccgagaagctgggattgtaggcacccgccaccatgcctggctaatttttgtttgtatttttagtaggtacggggtttcaccatgttggccaggctggtctcaaactcctgaccttaggtgatccacctgccttggcttcccagtttcccaaagtgttgggattacaggtgtgagccactgcacccagcctgtagtatttttttggggggatgaagttttgctcttgtcacccaggctggaatgcaatggcatgatttcggctcactgcaacctccgtctcctgggttcaaatgattctcctgcctcagcctccctagtagttgagattagaggtgcccgccaccacgtccggctaatttttatatttttagtagagacagggtttcatcatgttggccaggctggtctcgaactcctgactttacgtgatccacccgcctcagcctcccacagtgcttggattacagttgtgagccactgcgcccggcctgtggtattattttatagcagcgctgaatggatggagacagtggttggtcctaatcctcaatgtgatgatattgggaggtgtggccttttggaattagtgcctttttttgttgttttttgttttttgagtctatcgccgaggctggagtgcagtggcacgatctccgctaactgcagcctccacctcccgggttcaagcaattctcatgaaaccccgtctctactaaaaatacaaaaaaaaaaaaaattagccaggcttggtggtgggcacctgtaatcccagccacttgggaggctgaggtaggataatcacttgaacctgggaggaggagtttgcagtgagctgagatcacgtcactgcactccagcctgggccgtagagctaaactcagtctaaaaacaaacaaacaaacaacaccaaatgtacccatgaagtgagtttaacaggcaaataagtttccttgggagactgaggtcccttaaaggggggacagcaatatgtgacaagtgtgtccctattctaaagaggactgttaaatcatctggaggccaggcgaggtggctcatgcctgtaatttcagcactttgggaggccgaggtgggtggatcacttgaggtcaggagtttgagaccagcctggccaacatggtgaaaccctgtctttactaaaaatacaaaaattagctgggcgtggtgacaggtgtctgtaatctcagctactcaggagtctgaggcaggacaattgcttgaacctagaaggcagaggttgcagtgagctgagattttgccactgtactccatcatgggtgacagagtgagactgtgtctttaaaaaataatgaaaaagctgggcgcggtggctcactcgtgtaatcccagcactttgggaggccgaggtgggcatgtcaagaggtcaggagtttaagaccagcctggccaacatggcaaaaccccgtttctactaaaaatacttaaattagctgagcatggtggcgggcacctgtaatcccagctactccggaggctgaggcaggggaattgcttgaacctgggaggcagatgttgcagtgagccgagataacgccattgcaccccagcctgggtagcaaaagcaaaactccatctcaaaaaaaaaaaaaaaaagataaaataaataatctggatatgacttcctcaaagctctggccttaaaatattttttgacctttagccaacttctcaaatatatatatgtgtatatatatatacacacacacacacacacgcacacacatatatatacacacacacatatacatatatatataaatttatatagccagcctatataaatattatcaagatttctttgggctgcatgttgtggctcatgcctgtaatcccagcactttgggaggtggaagtgggaggatggcttgagcctaggagtttgagaccagtgtggccaacatagtaagaccccatgtctacttcttttaacaaaatataaattttgttaataaagaatatttctggccaggtgtggtggctcatgcctgtaatcccagcactttgggaggctgaggtgggcatatcacctgaggtcaggagttcgagaccagcctggccaacatggcgaaaccccgtctctactaaaaatacaaaaattacctgggcgtggtggcaggcgcctgtaatcccagctccttgggaggctgaggtaggagaatcagttgaacctgggaggcagaggttgcagtgggctgagatcgcaccactgcactccagcctgggaaacagagtgagactccatctcaaaaaaaaaaaaaaaaaaaaatttgtttgggaagggttgtaggaatgctgcccatgatgatgatgagataggtgcttctccccatctcaagccaagtgagagaaagttctagaaaacccggcatgttttccctggagtttggaggacatgatgacaccgttgtagagctccagtaatttttttttttttttttttttttaatgaagtctcaccctgtcgcccaggctggagtgcaatggcatgattttggctcactgcaacctctgcctcccgggttcaagcacttcttctgcctcagcctcccgagtagctgggattacagttgcctgccaccacgcctagctaattttttgtatttttagtagagatggggtttctccatgttggtcaggcaggcctggaattcccgacctcaggtaatccgcccacctgggcctcccaaagtgctgggattacaggcatgagccactgcacccggtcctgcttttttattaaaaggaagctgtctctgaagtgtcatacaagtaaagggtctcataagtctccaaaggttcagaaattgtggttgtgctccatgaacacaactttcaatgagaagcctattattcagattgtccatctgtcatggtaatttgttgccctggtcctaaagttgtgattgaaattgaatttttcctttaaggctgtactgggcatttgtgactttcagttgccctggcaacagcacatcctccccacactgaataatactgatggtataaaaaacacatgcagccaggtgcggtgcatcatgggtggacatggggaaaccccatctctactagaaatacaagaaattagccaggcgtggtggcatgtgcctgtagtcccagctactcaggaggctgaggcaggagaatcacttgaacccaggaggcagaggctgcagtgagctgagatggcaccactgtactccagcctgggcgacagagcaagactctgtgtcaaaaaaaccccaaaaacaaaaaacatgcaaataaagtaaaaagtgataggtgggacggccacctgtcagctgttgagctctactgtgggagaaggtctggggaaggattgggaggggtgtacgccatgaagggtgaggctgggagtgttacacgtgttatgcacagtagcaggtattggttagaatgagataagctgctgtaacaaatagacccccctgctgcccagccaacaatggcttaaaaaagagagtttatggctgggcaaggtggttcatgcctgtaatcccagcactttgaaaggctgaggtgggagggatagcatgaggccagtaatttgaaaccagcctaggcaacatagcaagaccctgtctctataagagaaaaatttttaaaaattaggtgggcttggtgatgtgtgtctacagtctcagtattggggcttagcctgggagggttcttgactttgcccatgtaagaattcaagggtgagccagtggtgttatttttttttctttttccttttttgagacagagtgttgctctgtcacccaggctggagtgcagtggcatgatctcagctcactgcaacctccacttcccggtttcaagtgattcttgtgcctcagcctcccaagtagctgggattacaggcatgtgtcaccgtgcccggctaatgttttgtggaggtgaagtttcaccatgttgctggctggtcttgaattcctggcttcaagtgatccacccacctcgggctcccaagatgctgggattacatgcatgagtcaccgtgtctggctcagtggtgttaaatagcaacttttactgaagcctcagtgcacagctgcagcagaggaattgccccttgcagagcggggctaccccacaggcagtgtgcccagaagagcagcccagaggcagcactgctgtcatatttatacccacttttaattatatgcaaatcaaggggcagtttatgcaaaaatttctaggatgagggtggtaatttccagtcaccgggtcattgccatggaaagtggtgctaaggtccgagtgttgccatggcaatggtaaactgatacggtacactggtgggtgtgtcttatggaaaactgcttttgccctagacctgtttcagccagtcctcagtttggtcctgtgtacaagccctgcctcctacctcagtagggtagggcactgggcagaactgtgtgactcccattccaggccccagctcctggaggacatttcgaacacaccgtgagggggaagggaagctgctgtgttgaaggtaaggacccagtcctggcaggttcatcacctgctgactaaagagcccttgggccctgaataatcagcagcggtggccaggccaggtggttcacgctgtgggccttaggtgagactcaaacgtgatggcttcaggtggaacctggcacattcccggctgtggtggctacatgggagagactccttctgcttgagaaagcagagaggccaggcgtggtggctcatgcctgtaatcccagcactttctgatcaagtggatcacctgaggtcaggagttcgagaccagcctggccaacatggtgaaaccctgtctccactaaaaatataaaaattagctgggcgtggtgggggtcggggggggcgcatgtaattccagttactcgggaggctgaggcaggagaatcgctcgaacctgggaggcagaggctgcaatgagtccagttcacgccattgcactccagcctggatgacagagtaagacactgtctcggaaaaaaaaaaaaaaaaaaagcaaagggaagtctgggcgtgatgtctcatgtctgtaatcccagcactttgggaggctgaggtgggtggatcatctgaggtcaggaattcaggaccagcctggccaacatggcgaaaccccatctctactaaaaatacaaaaattagccaggtgtggtggtgcatgcctacaatcccagctacttgggaggctgaggcaggagaatcgtttgaatccgggaagcagaggttgcagtgagctgagattgcgccactgcactccagcctgggcaacagagcaagacaatgtctcaaaaaaaaaaaaaggaaagcaaagtgaagagtaaatgcaacttcgtcttgcagcttagctgccagcttggccacagaggggtagagccccaagtgcactcttggggtccccgattccaggccatggctcttggacagcatttttggacctgccctgggccagagggaagtccacagccttgaagggagagttctaggcctggcaggattcactgcaagctgaccgaagagcgcttgggcctggagtgaacatcagtggtggccaggcagtacttgccgtgggcctggggtggtggccacagggagagacttcttggcttgtgggaaggagagagaagagtgggaaggactttgtcttgtggcttgggtagcccctcagctatagtagaatagagcgcccagtagattcctaaggtttccaactctgggttcaagctcctgcatggcatctctggacccacccagggccggggggacctcgccatcctgaagaaatgaacacaagtctgctggcttcaccacctactggctgtagaacgctcgagcctagagtgaacataggtggtttccaggctctgggtacagcgggccttgggtgagacccagggctgtgctggcttcaggtctgacccagtgcagtcccagaggtggtggccacagaggagcttgtgtcacccctcccccaactccaggcatctcagcacagagagactctggaaaaagtaagggaagagaacaagagtctctgcctagtaatccagagaattattattcttcttttatgaaacagactcttgctctgacacccaggctggagtgcagttgcgtgatctctgctcactgcaacctctgcctcccagattcaagtgattctcctgcctcagcctcccaagtagctgggattacaggcgcccaccacaatgcctggctaattttttgtagttttagtagagatggggtttcactatgttggccaggctggtctcaaactcctgacctcaggtgatccacccatctcggcctcccaaagcactgggattacaggcatgagccaccatgcctggcttacatatcttaactttttccttacagtttccctctctctgtcccttacaggtgcttctggaatagtattttcatctcgtccacttttttttttttttttttgagacggagtctcgctctgtcgcccaggctagagtgcagttgcgcgatcttggctcactgcgagttccacctcctgggttcacgccattctcctgcctcagcctcccaagtagctggaactacaggcgcccactaccacgcccaggtaattttttgtatttttagtagagacaaggtttcaccatgttagccaggatgatctccatctcctaacctcgtgatccgcctgtctcggcctcccaaagtgttgggattacaggcgtgagccaccgcgccaggctgaagtgcagtggtgtgaacatagctcactgcagcctcgatctcctggactcaagcaatcctcccacctcagcctccccagtagttggtactacaggtgtgcaccaccacatccagctaattttttgatttttttatagagatgggctttcgctgtgttgcccaggctaattttgagctcctgggctcaagcgatcttcccgtgtcagcctcctaaagtgctgggattacaggcctgaaccaccaagcctggcctcatttattcatttttaaagccctgtctattctgccctctgatacaccatccaacacataattatttcaataattgagtttttcatatccctcatctcccgttagcttctgcttcataacctcctcttctcgcttcgacttgccattatcctccgtcatttctctgaggatgtttgttatgtgtagtttacatgccttattagctctacttcattgggaatagtttcttccaagcccaactgagatatttgggcctcctgggtatgctggcaattatatgcctcagaaaaggtaacaattcactgcttcttaagactatggtagtttatggccaggcgcagcagctcacgcctgtaatcccaacacttaggaaggccaaggcgggcagattgcttgagcccaggagttcaagaccagactgggcagcatggtgaaatctagtctctaccaataacaaccaaacacgcaaaaaatccaaaaaacaaaactgataattttgagggttttttttttttgagcattgatttagaggtgaagtagagaaaccaatttgttttcttttttcttttttttttttgagacacggtctagctgtgtcactcaggctggagtgcagtggtgcagtctcggctcactgcaacctctggctcctgggttcaggcaattctcctgtctcagtctcctgagtagctgggactacaggctcgtgccaccacgcctggctaatttttgtatttttagtagagacggggtttcaccgtgttgcccagggtggtctcgaactgctgtcctcaagtgatctgcctgccttggtctcccaaagtgctgggattacaggcatgagccaccgggcctagccctctcctctcggttttctctggcaccatggaacctacttggaccccaggtgcaccccaaaagtgtggggatgtgtaatgtcttcctttgtaacgcccctgggaagctcttccctaaaggccaggcgagtttgctgcatcaatgccccagccacttcctccttcatttttattttatttatttttaaattgcctttataataatggcaaaagctggctggatgcagtggctcacgcctataatcccagcactttgggaggccgaggcaggtggatcacctgaggtcaggagtttgagaccagcctggccaacatggtgaaaccccatctctactaaaaacacaaaaaattagccaggtgtggtggctcagggctgaatcccagccactcaggaggctgaggcaggagaatcgcttgaacctgggaggcggaagttgcagtgagctgagattgtgccactgcactccagcctgggcaacaagagcgaaacttcatctcaagaaaaaaatgcaaaagcttttcattttgatgaagtccaattggccagcctacatttaaaaaaaaatttgaattttcattttttttattttttagagacatggtctcactctaacccaggctggagtgcagtggtgtgatcatagctcactgtagcctccatctcctgagctcaagagatcttcctctttttttttttttttttttttttgagacagagtcttgctctgtcaccaggccagagtgcagtggcatgatcttggctcgtggcccactgcaacctctgcctccctggttcaagcgattttcttgccttagcctctcgagtagctgggactacaggcgtgcaccaccatgcccagctctttttttcatttttagtagagacggggtttcaccatgttggccaggacggggtttcaccatgttggccaggatggtatcgatttcctgacctcgtgatcctcctaccttggcctcccaaagtgttgggattacaggtgtgagccaccgccctggcctctgtttttttgagacagagtcttgttctgtcacccagactggagtgcggtggtgagatctcggctctgcagcctctgtctcccaggttcaagcaatcctcctgcctcagccttgtgagtagctgggattacaggtgtgtgccaccaggctcggctgatttctttgtattagtagtagagacagggtttcacggtgttggccaggctggtcttgaactcctgacctcaagggatctacctgcctcggcctcccaaagtgctgggattacaggtgtgagccaccgtgcccggctcatgatcctccttcctcagcctcccgaatagctggaactacaggcacaagccccatgtctggctaatgaaaaacaaattttttttgagagatgggatctcactatgttgcccagactgatcatgaactcctggcctcaggcattcctcctatcttggcctcccaaagtgctgggatcacaggcttgagccaccacgccggcccactcctcatccttcagtgggaagattcggaggtattttctgcttggtttctcagagcatccccagccgtattgagccccggtttcccccagctgtgacgcactgatcagcacgcgcttattggcttttctctcatttctttcttatttttttttttttgagatggagtcttactctgtcgcccaggctggagtgcagtggtgtgttcttgggtcagtgcaacttccgcctcccgggtttaagagattctcctgcctcagcctcccaagtagctgggattacaggcgcccgccagcatacttggctaattgttgtatttttagtagagacagggtttcaccatgttggtcaggctggtctcgagctcctggcctcaggtgatctgcctgccttggcctcccaaagtgctgggattacaggtgtgagccactgcgcctggccttgtttctgacttggttctctaactcactcctgcttcctgggatcacctcccaaataaactgccatcacccaagtcattgtctcagaatctgcgtttggggaacccaagcaaatctgccactcttctgtagatgttgatgtagtttcatatgtatttctttgcccacaagaccttgttaccttcttggagggcttattaaaatggagaaaattgccaggtgcaatggctcatgactgtaatcctagcactttgggaggctcagacaggcggatcacttgcggtcaggaattctagaccaccctgggcaacatggcaaaaccctgtctctactaaaaatacaaaaattagccaggcatggtggcacacgcctgtaaacccagctactcgggaggctgaggcaggagagtcgtttgaatccgggaggtggaggctgcagtgagccgagattgcaccactgcactccagcctgggtgacagagcaagactctgtctagaaaaaaaaaaaaagaatacaaattgcttatttccaagaaaacatctctgccgtgctttcagattttcagctgattacaaatcacgcacccatgatcaaatccaacaagagatagaccccctgccataaaggaagaaggctggctgggtgtagtggcttatgactgcaatcccagtgctttgggaggctgaggcaggaggatctccgaggccagcagttcaagaccagcttgagcaatatagcgagacaccccctcatctctccaataataataaaaaaaatcagccaggcatggtggcgcgtgcctgtagtccaatctactcgggaggctgaagtgggaagattgctccaggagttcgagtctgcagttggctgagatctcgccactgcactccagccagggcggtagagccaaaccttgtctcaataaaatctccacaagggggcgccatctacatgatgatagcaggaagggaaccggccagtgtctcctggtgacgtactcattcagcgcttcttataccttaaaggtgaccaggaatcacctgggggtcttgttaaaatgcaggttctaattcagcagggctggagcaggaccacagctcttgcatttccctccctccttccttccttcctccctccctccctcccttcctccctccctccctcccttccttctctttcttctttctttccttctctctctctctctctttttttttttttgacagagtctcgctctgtcacccaagctggagtgcagtggtgtgatctcggctcactgcagccttcacctcctgggttcaagcagttctcctgcctcagccttccgagtagatggtgtcaggcctctgagcccaagctaagccatcatatcccctgtgatctgcacgtatacatccagatggcctgaagtaactgaataatcacaaaaggagtgaaaatggcctgttcctgccttaactgatgacattccaccacaaaagaagtgaaaatggccagtccctgccttaactgatgacattacctcgtgaaattccttctcctggctcatcctggctcaaaagctccaccactgagcaccttgtgaccccccacccctgccagccagagaacaaccccctctgactgtaattttcctttacctacccaaatcctataaaacagctccaccccatctcccttcgctgactccctttttggactcagccctcctgcacccaggtgattaaaagctttattgctcacacaaagcctgtttggtggtgtcttcacacggacgcgagtgaaagatgggatcacaggcccccaccaccacgcccaggtaattttttgtatttttagtagagacagggtttcactatgttggtcaggctggtctcgaactcctggcctcaggcagtctacctgccttggcctcccaaagtgctggattacaggcgtgagccactgcgccccgccaagatcttgcatttctaacatgtccaggaagcttgatgatgcggatcgagaaaacacactttggtagcgagggggctatggccttaaagttgggtaactgaaggggactccccacctggacccgtttgccctgttcctcaagccagctcaggttagcatcttcattattttattatttgtattttttttgagacagagtcttgttttgtcactcaggctgcagtacagtggtgcaatctctgctcactgcagcctccacctcccgggttgaagtgattctcctgcctcagcttcctaaatagctgggattacaggcacccgccaccactcccagctaatttttgtatttttagtaaagatggagtttagccatgttggccaggctggtcttgaactcctgacctcaagtgatctccccacctcagcctcccaaagtgttgagattacaagcatgtgccaccatgcccatctaattttttttttttttttttttttttttttttttttgagacggagtcttgctctgttgcccaggctagagtgcagaggtgcgatcttagctcactgcaagttctgcctcccaggttcatgccattctcctgcctcagcctcccgagtagctgggactacaggcacccgccaccatgcccggctaatttttttgtatttttagtagagatggggtttcaccatatgagccgggatggtctcgatctcctgacctcgtgatctgcccgcctcagcctcccaaagtgctgggattaaggtgtgagccactgtgcccggccaatttttgtatttttaatcaagacagggtttcgccatgttggccaggctggtctcaaactcaaggcctcgagcaatcctcctacctcggccttcaaagtgctgagattataggtgtgagtccctgcatctggttctaactgtatttttgtacccattaacccatttttctttatgtctccctcccaccttcccttctcagcctcaggtaagcaacattcgactcgaatcacactcttaaacacttacaactttagaattagagaattctagaattttcagtgtaataatatcagcttccattctgtatttttttttttttttagttgttttagagacacagtcttactctgttgcccaggctggagtgcagtggcacaatcacagctcactgcagctggtcggataactcctgggctcaagtgattcttccacctcggcctcctgagtagctgggactacaggtgtgtgctactgtgcctggctaatttaaaacaattttttttttgagacggagtcttgctctgttgcccaggttggagtgcagcggtgcaatctcggctcactgcaagctccgcctcctggattcatgccattctcctgcctcagcctcccgagtagctgggaccacaggcgcccaccaccacgcccggctaattttttgtatttttagtagagacggggtttcaccgcgttagtcaggatggtctcgatcttctgacctcatgatccgcccacctcggcctcccaaagtgttgggattataggcgtgagccaccgcgcctggccaaaaacaatttttttctgtagaaatggggtcatgctatgttggcctggctggtctcgaactcctgagctcagtgatcctcccacctcagcctcccaaagtgctgggattacaggtatgaaccaccacgcctggcctccattctgcattctgtgagcttgcacgtctcatctccacctactttgttggttatgaaggcttagaagagcccctggtcctgagcaagcactatgattattactattattttaaaattattattattatttttgagatggagtttcgctctgttcgcccaggctggagtgcaatggcgacatctcggctcattgcaacctctgcctcctgggctcaagtgattcgcctgccccagcctccccagtagctgggattacaggtgcgtgacaccatgcttggctgatttgtgtattttatttatttatttattttgagacggagtcttgctctgtcgcccaggctggagtgcagtggcatgatcttgactcactgcaacctccgcctcccaggttcaagcaattctcctgcctcatcctcccgagtagctatgattataggcacatgccgccacgcttggctaatttttgtattttcagtacagatggggttttaccatgttggacaggctggtctcgaactcctgacctcgtgatctgcctgccttggcctcccaaagtgctgggattacaggcgagtgacatcatgcctggctaaattgtgtattttatttatttattttttttgagatggagtcttgctctgtcacccaggctggagtgcagtggcatggtctcagctcactgcaacctctgcctcctgggttcaagtggttctcctacctcagcctcctgagtagctgggactacaggcgtgtgtgaccacacccggctaatttctgtatttttagaagagacggggtttcactatgttggctgcgctggtctcgaactcctgatctcgtgatccgcccgcctcggcctcccaaagtcctgggattacaggcatgacccaccaggcccagccacccggccctatttttattattattgctggtgctgatgttttctgcccgcctttgagatgccctcagcttggcgcatcctccagcttcctcctgcctgtatccctcccccggtgcttattgcggcctctgggccttactcagaccccccgtggtgctagagtttctggtaagttggtcaggccagggtcggataactgcatgggcacaagcattgccgctgatgagcccaccacatcctgcctcaaaagccactgtggccacagctgaggaaccctcgtgccaagggagtggagggtggtaagtggtggtcaaccagcccagtttggctggttctgggcttcctgtggccgctggcaagctggtggctgggcacagctgcttctccttgggatgtggtagctgcagccgcctgctcagtccatccttcctgatgggggttggcattgcacggtgcgatgggtttgtgaatgcaaaataacatgtgctccatgtgccctttggtcatgatttctttctttctttctttctttctttctttctttctttctttctttctttctttctttctttttctttccttccttccttccttctttctttccttccttccttccgcctttctttctctttctttctctctctctttctttctctctttctttctctttctttttctttccctccctccctccttctctcctttccttccttccctccctcctctctctctttctctgtttctctttctctatttctccttccttccttccttccttccttccttccttccttccttccttccttcgtcttgtcttgtctttttcttttcttttcttttctttcttttttttttttgagacagagtttcactcttgttgcccaggctggagtgcagtggcgcgatctcagctcaccacaacctccgcgtcctggtttcaagcgattctcctgtctcagcctcccgagtatctgggattacaggcacgtgccaccaggcccagctaattttgtatttttagtaaagacagggtttctccatgttggtcaggctggtcgtgaactcccaacctcaggtgattctcccgcttcggcctcccaaagtgctgggattacgggtgtgagccaccgcacccggccttttttcttcccttcctttcccttccctcccctcccctcccctcccctcccctcccctcccttcccttcccctctcctctcctcccttcctcttctcttcccttcccttcaccatgttggccaggctggtctcgaactcctggcctcaggtgatccgtccgcctaggcctcccaaagtgctggaattacaggcgtgagccactgcgcccagcataaaaaaaggacttctattgatatataaaaatacagacagaagagttcaccaataataagcttaaagaatttttacagctgaatatccctgtgtaaccaacactcagatcaagaaaaagacttttcccagcatccagacccccgccttccgtttttacccctcaaaaataacttctttcctggcttataacatcgaagtctagttttgtgtgttcttgattttttttttttttttgagttggaatcttgctctgtcacccaggttggagtgaaatggcatgatctcggcttactgcaaacttcacctcccgggttcaagtgattcctgtgtctcagcctcccaagtagctgggattacagatacccgccaccatgcccgactaatttttgtagttttagtagagatggggttttgccatgtcggccaggctggtctggaactcctgacctcaggtgatctgcccacctcggcctcccaaagtgctgggattatagatgtgagcagccattcctggccttattgagatcttttacaatctgtttttttggtactaagtctttgaaatccagtatgtgtgtcattttcacggcccatgttaatatggactcactgtatttcaagcactcagtgcccagatgtggctggtggctgccgtaatgggcattgctggtctggatcttgaagaagaggatgaagggacactggcacaaaagttaccaacacaggccaggcgcagtggctcatgcctgtaatcccagcactttggaaggccgaggcaggtgggtcatctgaggtcgggagtttgagaccagtctgaccaacatggagaaaccccatctctactaaaaatacaaaattaacctagcgtggtggcacatgcctataatcctagctactcgggaggctaaggcaggagaatagcttgaacccgggaggcggaggttgtggtgagccgagattacaccattgcactctagcctgggcaacaagagcgacactccatctcaaaaaaaaaaaaaagttaccaacataaaaaatggtgtgtacacactctgtcctgcaatttcatttctagagagtcatctaccataaatacttgtacatgcatacgagaatatatatacaaaggtgctcattatattataacccaaaatattggaaaccacctaaaatttcaccattagggaggtgattgagtaagcaaatttaaaactaacaacagacttcttcttcttttccttcttcttttttttttttcttttgagacggtgtctcgctctgtcgcccaagctggagtgcaatggcgcggtctcggctcacttcaacctccacctcctggttcacacgattttcctgcctcagcctcccaagcagctgggattacaggcgtgtgccaccacgcctggctaatttttgtatttttagtagagacagggtttcaccatgttggccaggctggtctcgaactgctgacctcgtgatccacctgcctcggcctcccaaagtgctgggattacaggcgtgagccaccgcatccggccttcttcttcttcttttcttttttgagacagggtctcgctctgtcacccaggctgggtgatcatagacagtggtgcgatcatagctcactgcagcctcaatctcccaggctcaggtgatcctcccacctcagtctccagagtagccgggaccacaagtgtgcaccactacacttggctaatttttgtattttttgtagacatggggtttcttcatgttgcccaggctggtcttgaactcctggcctcaagcaatcctccctccttggcctctcaaagtgctgggattacaggcgtgatccactgcacccagctaaaggatttcttatgctgttaaaacagaacaaagtgttttaaaatgtatttacaaaaacatcattctgacgccaggtgcagtggctcttgcctgcaatcccaacactttgggaggctgaggtgagaggattacttgagcccaggagttcgagacaagcctgggcaacatagtgagacccccgactctacaaaaaataataaaaccaaaatgaaaaccaaaacgttatccagaaaaacaaagtgataaagtacattactggggcccagcatggtggctcacacctgtaatcctagcactttgggaggtcgaggtgggaggatcacctgaggtcaggagttcgagaccagcctggccgacatggcgaaaccccatctctactaaaaatacaaaaatttggtggctcatgcctgtaatcccagcacttcgggaggccaaggcgggcggatcacgaggtcaggagatcaagaccgtcctggctaacacggtgaaaccctgtctctactaaaaaaaaaaaaatacaaaatattagctgggcatggtggcgggcgcctgtagtcccagttactcgggaggctgaggcaggagaatggcgtgaacctgggaggcggagcttgcagtgagccgagatcacgccactgtactccagcctgggcaacagagtgagactccatctcaaaaaaaaaaaaaaaaaattagccgggcgtggtggctgggcgcctataatccaagctacttgggagactgaggcaggagaatctcttgaacttgagtggcggaggttgcagtgagccgagattgtgccactggactccagcctgggcgacaaattgagactctgtctcagaaaaaaaaaaaaaagttattggaacaactggtgaaatttcagtgagggctgagtatagtgtggtatcagtggcatatttccttattttgataaatatattgtggttatgtcagagaatatcctgtcataaccgcaatataagagatacacagtaacaaatttatggtaaaggagcatgatgtttccaaagtactctcaaatgattccaggaaaaacataagtagacatagatatatacgcctgtattatttttctagggtttaccagcccccacaattgcatgagccaatttctttttttctgtgtgtgtgtgacaaagtttcgcccttgtcactcaaggctggagtgcaatggcacgatctcggctgactgcaacctccacctcccgagttcaagtgattcttctccctcagcctcccaagtagctgggattacaggtgcccaccaccacacctggctaattttttgtattcttagtagagatggggtttcaccatgttggccaggctggtcttgaactcctgactttcaggtgatccacccgccttagcctcccaaagtgctgggattacaggcgtcagccaccgtgcccggcctctgtctttttttttttttttttttcgagacagggtcttgctcttttgtccaggttgcagtgcagtggcacaatcataggtcactgcagcctcgacctcctgggctcaggtgatcctcctgcctctgcctcctaagtagctaggactataggtgtgctccaccacacctggataattttttgtgttttgtagagatgggggtttcactatgttacttaggctggtctggaactcctggactccagtgatcttcccaccatggcctcccaaaatgctaggattacaggcatgagccattgcttctggccccaattgctttctttttctttctttctttttttttttttttgaggcagagtctcactttgtcgcccaggctggagtgcagtggtatgatctcggttcactgcaacctcttcctcctgagttcaagtgattctcctgcctcagcctcccaagtagctgggactacaggtgcctgccaccattcccagctacttttttgtatttttattaaagacggggtttcacaatgttggtcagcctggtctcgaactctttacctcaagtgatcttccctcctcggcttcccaaagtgctgggattacaggcgggagccaacgcacccggccgcttttactattcttgcaacttttttcatttgacattccatcgaaataaaaagttaaaaaaattctttttcttctgagggggtgttttatcaaggacacctttatcaagggtcccgggcctaaaaatgttaagaacccatgatttacggctgaggaggcaacttccatccaaaatcctaaaagtcaagttcctgtgacctggcttcctgaacctccccgctcctgcgccccctggaggtcagggctagaacaacacggcattcctataatgctccaaatcgccacaaatcgaccttggaaatcctgggtgagtaacgcagactgcgcacatggcttcaattagcggaactaaaacttgctgaacatcgtgtacccgcgtgtccatggccaaacacaaactccacctttgtaaaagtctaggtgaattcccagctgaattcagaagcgtgacaggaatgggacttttcattggtgtctttttcttttttctatttttagagtggggaggagtgtatttctggattgtttaaatatttacaatgagcatgcatttcctttgcaattaaaagaaaaccagatttttttttttttttttttgaggcagaatgttgctctgtccccaggctggagtgcagtggcgcgatctcggctcactgcaacctctgcctcccgtgttcaagcaattctcctgcctcagcctcctgagtagctgggactacaagtgcccgccaccacgcccagctaatttttgtatttttagtagagacggggtttcaccatgttagccaggatagtctcaatctcttgaactggtgatctgcctgcctcggcttcccaaagtgctgggattacaggcatgaggaccgcacccggccgaaaaccagatttttaaaaattgaagtttgctgtagaaaaatactgtgggagaaagttgtgggtggtgttttgtagagtcgcagaaggacatgggaaaaaaaaattgagtgtgtttctgtaatcatcataacaatcacactcattgtgccgtaggctccaagggagggctctgagctgtggttaccagataaaatacaagattctcaggtaaaatgtgaaaaaaaaaatatttttgtgatcttaactcactgcagtcttgatctcctgggctgaagtgatcctcctgcctcagcctcccaggtagctgggaccacaggcacgtgccaccatgcccagctaatttttaatttattttgttgagatgggatctcactatgttgcccaggctgctctcaaactcctggcctcaagcgatctttcctcggtgtccccatgccctgggattacaggtatgaagcaccaggcccaaccctgaaatttaaagttaactgggcagtctgtaatgtgtttttgtttgtgtaggtgtgtgtgctaaatcaggcaaccccctattctgagcagaggagtgctttgatctgacttagattttaataggctccctctggttgctggtggagatgagactacggagggggggcagtgaagatcccagagaggaggctgctgtaatggtccaagcagaaggtgatagtgatttggatcagggtaacagagccgaggtggtgagaggttgacaggtcatgcatctatttcgaaggaaaggccatgtccaggctccttagctcggcattcaaggcttctctccaccactggacacacttactctctagcttctcagaccctgttgcagatagaatcatgatccccaatgatgtccacatcttaatcccctgaacctgtgaacaggtgaccttccatggcaaaagggactttgcagataggatgaagttaaagatctttagatgggggagcgattatcctggattgggtctgggtgggctcagtggaatcacaagagtccttatatgaggaagatagaaatttgagacatacggtagaggaggaggtgatgagaccacagaggcagggacgggcgtggtgcaaccacaagccaaggaatttcaggagccacctgaaggtgggagaggcaaggaacagattctcccctggaacctctggagggagtggtgacatcttgattttggacttctggcctgcagaaccatgccaaaataattgtctggctttttttttctttttttttccttgaggtggagtcttgctttgtcgcccaggctggagtgcagtggtgccatcttggctcactgcaacctccacctcccgggttcaagtaattcttgtgcctcagcctcccgagtagctgggactacaggcatgcaccaccacacccaggtaatttatgtatttttagtagagatggggttttgccatgttggccaggctggtcttgaactcttgacctcaatgatctgcccgcctcagcctcccaaagtgctgggattgcaggcatgagccactgcgcccggtcctggtgttaagcccgcagtttgtgctaattggttacagcagcctcgggaaggtaatctaggctccttccttgccccaggctctaggaagtatcttagcccccagccctgggctgcagacctgtaccagtccatggcctgctaggaaccatgcagcatcgcaggaggtgagtggcaggtgagtaagtgaagcttcatctgtatttatagccacgccccttcgctcatattaccgcctgatctgtcagatcaggggcggaattacattctcataagagcgtgaacccaggccgggcgcagtggctcaagcctgtaatcccagcattttgggaggctgaggcgggtggatcacgaggtcaggagttcgagatcagcctggccaagatggtgaaaccacgtctctactaaaaatacaaaaattagccgggtgcagtggtaggcacctgtagtcccagctactcgggaggctgaggcaggagaatcgcttgaacctgggaggcggaggttgcagtgtgccgagatcgtgccactgcactctagcctgggtgagagagtgagactccatctcaaaaaaaaaaaaaaaaaaaaaaagagcatgaaccctgttgtgaacagcgcatgtgagggatctgggttgcaagctccttatgagaatctaatgcctgatgatctgtcactgtatcccatcacccccagataggaccatctcgttacaggaaaacaagctcagggattccactgattctacattatgttgaattgtataattatttcattatatattacaatgtaacaataatagatggagatggttgtggcttgtgtagttgggggacagggtagctccattttctattgccaactttataaccctagaaggatgatttttttcttttcttttctttttcttttcttttttttttttttgagattgagtcttggtgttgtcagcctgggctggagtgcaatggtgcaatctctgctcactgcaacctccgcctcctgggttccagcaattctcctgcctcagccttctgagtagctgagattacaggcacccaccaccacgcctggctaatttttgtatttttagtagagatggggtttcaccatattggccaggctggtgacgatggttttttttttttgagacagagtcttgctttgttgcccaggctggagtgcagtggcgcaatcttggctcactgcaacctctgcctcccaggtttaagcaattctcctgcctcagcttcccaagtagctgggattacaggcacctgccaccacacctgggtaatttttgtatttttagtagagacagggtttcaccatgttggccagactcgtcttgaactcctgacctcaagtgattcatttgcctcagcctcccaaagtgctgggattataggtgtgagccattgcacctggccctagaaggaagatttaacagtaaaatatacttaaatgctgggctacctccgcagactagctcagcctctttgggtctcaaatcagcctggccgggaggctgagtggaggttacagtctctgctttcttgaatcccaagggaggggtttaagccaactgcattcctgagcttttgcccagaaggctggcgtcttaggaggaaagagatagatggctccaggccgggcgcagtggctcacacttgtaattctagcactttgggaggttgaggtgggtgattgcctgagctcaggagtttgagtccagcctggccaacatggcgaaaccccgtctttactaaaaatacaaaaaattagccgggggtggtgacacacacgtgtaatcccagctactcgggaggctgaggcaggagaagtgcttgaacccaggaggcagaggttacagagagccgagattgcaccactccactgcagcctgggcgacacagcaagactctatcaaaaaaaaaaaaaaaaaaatgagagagaagagatggccccaaatagggaaaccaaggccaggagaggggccgagcctgcacaggagcttcctcggttttccgagcgccggccccccttctctgcctgggaggaggtggttagagtcccctgggtgtgtgccccgcagagggagctctggcctcagtgcccagtgtgcagaccaatgagagccccagagagaaagacggtcatttcctccctgcatcttcccttggggctttaaaaaccacagcccttgggcaggagggaccttcgatcctcggggagcccaggagaccagaacatggtgagtctcgaaggggaatgggagcaggaaactttgtcctgggtccctcccatctttgctccagtgggtccttctctctccccaactctcgccgtcaactctgtctgtctctccctttccttctctctccctgtcttccacctcccaccttccctctctcctgcatcccaggctctcacactccagggctgggatgtggccatgggaataagattgtcaagattgtgggagcaacagcaacctcgtggggctggggcccgagaagattccccaggggaggggacccttgagttgggtctagtaaggtgactaagaattccacaagcagccgagcgcagtgggtcacacctgtgatcccagcacattggggattgtgccaaggcgggaggattgcttgaggccaggagttcaagaccagcctggccaacatagtgagaccctgtctgtatttttttttttatttaaagaattccacaagtgaagaaatctagaacaggccttccaggcagtgggaatggcagagaaaatgttgggaggctggaaagaaccagtttggaggaatggtcaagttactcagatgctcttgcagatagatgttcttttctttttcgacttggggtcttgcactgttgcccaggctggagtgcagtggcaccatcatagctcactgcagtcttgaactcttgggctcaagtgatcctccctctttagcctcctgagtatctgggaccacaggcatgcaccactatgtccggctaatttttaaaatttttattcttgtagagatgggttcttgctatgttgtcagggctggtctcaaattcctggcctcaagccatcctcccaccttggtctcccaaagctctgggattactggcatgaggccattatgcctggtcgtttgagatgttctgcatgacagagatggggaaactgaggcccaggcaggagcagagatggatggggaccctccatggttggtggcagaagcaggttatgccatggattctgtgagtgtcagaaggaatgcaccccaggctaaatgagggtccctgtcatccctgcgtctggaggcctgggcactgagccagcagagctgcgattcagcacctgctgtaacacaggcattgccttgcttcatctgtgtcaaagaggaaacggaagatggtttggatggaccagggaggggtctgatgttgcttcattcctgcattccacccttgagatccgacttgggcaaacgggactctctgattcttcttcttctttttttttttctttccaaaacattttccaaagtaccaaatgatacttggtaaaaactcattctcggccaggcgcggtggctcatgcgtgtaatcccagcactttgggagactgaggcgggcggatcacaaggtcaggagattgagaccatcctggccaacatggtgaaactccgtctctaccaaaactacaaaaattagctgggcatataagcgggcgcctgtagtcccagcacttgagaggctgaggcacgacaatcgcttgaacccatgaggcagaggttgcagtgagccgagattgctctactgcactccagcctggcaacagggccatctcaaaaaacaaacatagaaaaaaaaaaactcattctccctgcctaccccagagcctctgactccttttctttccttttattttgagacagagtttcactcttgtcgcccaggctggagtgcaatggcacgatcttggctcaccacaacctctgcctcgcggcttcaagcaattctcctgcctcagcctcccgactaggtgggattacaggcatgcgccaccacgcctggctaattttttgtctttttagtagagacggagtttcaccatgttggccaggctggtcttgaactcctgacctcacgtgatccacccacattggtctcccaaagtgctgggattacaggtatgagccaccctacctggccctctgactccttttcattgcctcctaccctacctggggcaaccatgggatgccagtttgtggtggatccttccagaaacagtttacagatgcctgagagcacagatgcttagggaacaaagtaaggactagtgtgatgcggggaaccccaaaaccgagctcagcttctgtctctactatgaaatagttgcggagatctgtcctctccgtgcttctgtctccttatctttttgttttttgagacagtgtcttgctctgttgcccaggctagagtgcagtggtgtgatctcagctcactgtaacctccacctcctgggttcaagtgattctcctgcctcagcctcccaggtagctgggactacaggtgcctgccaccatgcctggctaatttttgtatttttagtagagacggggtttcaccgtgttggccaggctggtcttgaactcctggccccaagcaatcttcccgccttggcctcccaaagtgctgggattacaggcgtgagccatcgcacccagcctccttctccttatctttaaggtgaagataatactagaatctacatcataggctagttgagagaattgactgagtgaatgcatgaaaagttcttgtagcagtgcctggtatacagttggcgctcaatgtgggtgacatttctatcctttcccagccttataaatggcagtatgttttgtacagtactctacatctggcttttttaaatgaataacatatagtattattaactagcatttattgagtgcttactgcataccaggcgttgtattaggcattcattaatttccccttaaccttgaggaaggtacttcattcccgtgtagttcaagggagttgcctcctcctcctcctcctttttttcttttttctagacagggtctactgaggtcttccacctcagcctcctgagtaggtgggactacaggtgcatgccaccacacccagctagatttaaaattttttgtagaggtggggtcttgctatgttgcccagcctggtgcttctttctttcttttatcagctgagtaatatgctagtaggaggtttcatccccttcaatggaaatttagtttgcttctaatatttggtctgttttgttttgttttgagacagagtctcgctctgtcacccagcctggagggcagtggtgcagtcttggctcactgcacctctgcctcctggattctggtgattctcctgcctcggcctcccaagtagctggtatcacaggtgcgtgccaccacacacggctaatttttgtattttattttagtagagacgggatttcaccatgttggccaggctggtctcgaactcctgacctcgtgatccacccgcctcagcctcccaaagtgctgggattataggcgtgagccaccgcgcctggcgtccagccacattctttaactcagcatctgcagaccttccagtcctatcttggccgcctgccagccatgctgacctttcgtttctgctgtgcaccacctgcccttcctctctcctttctgcctagaatgcatgcccccccactcccaatgcactttaggcctgcctggtagccactcaaacagagggctctgggctgggcgcggtggctcatgcctgtaatcccagcactttgggaggctgaggtgggtggatcacgaggtcaggagatcaagactatcctggctaacacggtgaaaccctgtctctactaaaaataaaattagccaggcatggtggcgggcacctgtagtcccagctactcgggaggctgaggctagcaaatggtgtgaatccaggaggcggagcttgcagtgagctgagatcgcgccactgcactccagcctggggacagagcgagattccgtctcataaaaaaaaaaaagagagagagggctctggggctcagctctcaggagtttctctcctgtctctgttcttgctaaccgagaagacttggagaggtctgttcatttctctgtagcctcatttttctcttctggaaaatgagtgttgctgttgcaacaagtaagtctcctagggttgctttgtgggttcaatgagataatacacgagaaaggctcaggacagcctggcaatgattatggctgttcttgtaggtactgcgccttctccttcaccctgttctcatccgatcgttcacatcttgcggccagcacccttgtctaagccaccgtcatgcctcacgtcacctggacagttccaatctccgtttcctcccagcttctgctctctgcccctttctccatgcaacagacaagggttgttcctctaatgagcatgtgaatttaggaagaataatagtaccctgccctttgtgctattgtcacatagatatgcactgtgattaggaaattactaagccaacacctgggaagcacatggaatagtgccgggcaattagaacccccagagtggccctggacctgcactgcccaatatgtgggccacgtgccacaatgcagctacctacgtttatttttcactattttattttattttactttatttattttatttttgagatggagttttgctcttgttgcccaggctggagtatagtgaagcgatctcggctcactgtagcctccacctcccgggttccagtgattcttctgcctcagcctcccagatagctgggattacaggcgcacgccaccactcctggctaatttttgtatttttagtagagacagggtttcaccatgttggtcaggctggtcttgaactgctgacctcaggtgatccacccgcctgggcctcccaaattgctggaattacaggcgtgaaccaccgtgtccagcctattttattttttagagatggagtctcgctatgttgcccaggctggagtgcagtggcacgatctcggctcactacaacctccacctcctgggttcaagtgtttttcctgcctcagtctactgagtagctggaattacaggtgcctgccatcacacccagctaatttttgtatttttagtagagacggggtttcactatgttggccagtctgggcttgaactcctgacttcaagtgatccaccttccttggcctcccaaagtgctgggattacaggcgtgagccaccacgcctggcctcaccctagatcttggaggtctttccacatcattatataaacattctttttgtctgtttttttcctttttgtagggatagggtcttgctaggttacccaggctgatcttgaactcctgggctcaagcaatccccctgcttcagcctcccaaagtgctaggattacaggcatgagccactgcacctggccaacttttccattctttttgatagctgtgtagtattctgttgcctggatgtaccatcattaatttagccagtcccctcttgctggacatgtcagttatttccagtctttggagaggtgctgcagtggcaaactttgcaagccgtttgcgtctgaagatcccggaaaccacaggacgttggaatcagcgtattttttctgcctttctgaagtcaaccagaggaaaggactgagtgagctcatggcaggaacggagctttgtcagctgatgagggagtgacaaggcgatgtcagagcagagggtggggaggctccccttacgagggtctgagtcattctgcagtcaaggattgctgggagcttgcgaaaccagcagaggcaaaatttaccttcatgcgtcacagccaaagggaacattcaaaatatttaacaatgtgctaaagtgcagaggtcccctgggcagggtctagggcctcctgctgcacctagcattaactctttagtgacatgaacatggcgacctggagtgggggtgtcccagagtaggaaacaggaacttagggtgctgggagcgggcaatagaagaagtgggtggctgagggcaggggctgtttaccagtgaaaatatttttaaaaatgttaaccttctatttggaaatattttcaaacttacggaaaaatgacaagaatggaacaggctcatatacatatacattttacctagactctccaaatttactgtatctgtctctccattatccatccatccatccatccatctgtccatcgattcatccatccatccatccatccatccatccgttatctagctattttttttttttagacagagtcttgttctgttgcccaggctggagggcagtggcgcaatcttgactcactgcaacctccacctcccaggttcaagcgattctcctgcctcagcctcccaagtagctgggactacaggcacacaccactgggcccagctaatttttttgtacttttagtggagatggggtttcactatgttggccaggctggtcttgatcttctggcctcaagtgattacaggcatgagccaccatgcccagcccattatctatgtatctatcatctatctatctatcatctatctctcaatcatatctccatgtatccattgtctgtccatcagtcatctatctgtccatcatccatgcatccactcattcacccattcgttatctatccatccgtttatttatatccatccatctttctatcacctttttttttttttgagacagagtcttgctcagtcaaggctggagtgcattggcatgatctcagcttactgcaacctccgcctcccaggttcaagtgattctcctgcctcagtctctggagtagctgggattacaggtgcgcgccaacactctggctaatttttgtatttttaatggccttttgtgactggcttctttcacttagcatcatgttttcaagattcatccacattgcagcatgtgtcagcacttccttttcatagctgagtaatattccaccacgtggctaaaccccacctttttcattcactcattagcagatactgacatcttatctttcaataatttactcatggatatgattccaccagtaaatgcccactgcccatagcctggctaaccttgggcaggtgcaatgtaagggaactagaaaaaaaaaaacaaaactatccaggcatggtggcttacatctgtaatctcagcactttgggagttcaaggcaggagggttgcttgaagttaggagtttgagaccagcctgtgcaacaaagcgagacccatctctaccaaaaaaaaaaaagaaaaaaaatacaaaaattagctgggtgtggtggtgcacaattgtagtcctagctactcaagaggctgaggcaggaggattgcttgagccagaggggctggggtgacagtgatccatgattgcaccactgcacataagcctgggtgacagatcaagaccccgtctcaaaaaaaaaaaaaaaaaaaaaatataaaacggggctgggcgtggtggttcatgcctgtaatcccagcactttgggagaccaaggccggaggattgcttgaacccaggagttcgagaccagcctgggcaatacagtgagaccctcctctttaaaaaaacattaaaaattagctgggcacagtagtatgcacctgtagtcccagctgcttgggaggctgaggcaagaggatcacttgagcctgagaagtcaaggctgcagtgagccaagatcacacccctgagctacagcctgggtgacagagtgagactcagtctcaaaaaaaaaaaaatatatatatatatatagtggttcagggatgtggatctgagctcttcaataactgacaaataataataccaatggctgccacttcttgtcctcttctctgtgtcaggcgctgtgctaggtgcttaggcatttttcatcttatttaatctttgaggtgagtgttttaaaggtagaaaaaccaggccgggtgtggtggctcatgcctgtaatcccagcattttgggaggccaaggcaggcagatcacgaggtcaggagttcgagaccagcctgaccaacatggtggaaccctgtctctactaaaaatacaaaaattagcagggtgtggtggcaggtgcctttagtcccagctactcaggaggctgaggcaggagaatcgcttgaacctgggaggcagaggttgcagtgacccgagatcgtgccactgcagtccagcgtggcgacagagtgagactccatctcaaaaaaaaaaaaaaaatgtacaaaactccatctgcaaattcaaatatttagagctgcaaatacagctctcagtatttccagaatgatttctatttcttgctgtccccttttctctgggttggtgtcaaagtggccttcaggactgggctagctccataggtcacaaaactcacctcttggaaatggtcaggggcagcctgtctggtttgcattccagcccgtatgggttcacatcctctctgagtgacctggaacagcctacttcaccttctggtgcctcgtgcttcttcatcagcgaaatgggcatttttttttctttcttttttttttttgaggtggagtctcactctgtcgcccaggctggagtgcagtgtcgctatctcagctcattgcaacttccacctcccaggttcaagtgattctcctgcctcagcctcccgagtagctgggattacaggtgcccgccaccacgcctggctaatttttgtatttttagtagagacggggtttcaccatgttggccaggctggtctcgaacccctgacctcaggtgatctgcccaccttggcttcccaaagtgcttgggttataggtgtgcaccaccacacctggcctgaaatgggcatattaacagaacctccttgtaggttgtggtcaggatggaaagagcaaattccatgccgcatgcatagtaggtgctcagtaagtactggctgctttcgggtgatcactcagtgccctgatgggtgctttactgcagtgtctggtgcctctggacacagatttcacctacaaggctttctccagtccagctgccatggactgcagcctttctttcttgggtgcatgacagcttccttcagctctgtctgggaagaagtgatcaggacctttttgttctatttttttttttttttttttttttagatggagtctcactctgttacccaggctggagtgcaatggggctgtttcggctcactgcaacctctgcctcctgggttcaagcaagtcttctgcctcagcctcccaagtagctgggattacaggcgcccactaccacgcctggctaatttttgtatttttagtagaggcggggtttcactacattggtcaggctgatcttcaactcctgacctcgtgatccacccacctcggcctcccaaagtgctggattacaggtgtgagccaccgtgcccggccagtagggctagactttgacgttaggctgctggatcgtggggaagcccaggggcttcgcaggatgggactgaggggagaggtggcagactggcaaggggtccaactagcatggaatcatttcattttttttttttttttttttttgagacagggtctcactctgtcacctaagctggagtgcaatggtatgatctcggctcactctaacctctgcctcctggggtcaggtgatcctcctacctcagcctccggagtagctgggactacaggcaagtgcaaccacgcctggctaatttttgtattttcagtagagacggggttttgccatgttgcccaggctattctcaaactcctgggctcaagcagtccgcccgcctcggcctcccaaagtgctgggatgacaggcgtgagctacggcatctgcctcaatattttaataagtggtgtgacaccctagttgactctcagccctcagcatccccatttcctagtgagaaaaagccacacaggggaaaagccacatgcctgagccaggatgccccctacccgggcacatgtctgcagactcatcctctctgctctctccgattccccttaggactccttcaattataccacccctgattatgggcactatgatgacaaggataccctggacctcaacacccctgtggataaaacttctaacacgctgcgtgttccagacatcctggccttggtcatctttgcagtcgtcttcctggtgggagtgctgggcaatgccctggtggtctgggtgacggcattcgaggccaagcggaccatcaatgccatctggttcctcaacttggcggtagccgacttcctctcctgcctggcgctgcccatcttgttcacgtccattgtacagcatcaccactggccctttggcggggccgcctgcagcatcctgccctccctcatcctgctcaacatgtacgccagcatcctgctcctggccaccatcagcgccgaccgctttctgctggtgtttaaacccatctggtgccagaacttccgaggggctggcttggcctggatcgcctgtgccgtggcttggggtttagccctgctgctgaccataccctccttcctgtaccgggtggtccgggaggagtactttccaccaaaggtgttgtgtggcgtggactacagccacgacaaacggcgggagcgagccgtggccatcgtccggctggtcctgggcttcctgtggcctctactcacgctcacgatttgttacactttcatcctgctccggacgtggagccgcagggccacgcggtccaccaagacactcaaggtggtggtggcagtggtggccagtttctttatcttctggttgccctaccaggtgacggggataatgatgtccttcctggagccatcgtcacccaccttcctgctgctgaagaagctggactccctgtgtgtctcctttgcctacatcaactgctgcatcaaccccatcatctacgtggtggccggccagggcttccagggccgactgcggaaatccctccccagcctcctccggaacgtgttgactgaagagtccgtggttagggagagcaagtcattcacgcgctccacagtggacactatggcccagaagacccaggcagtgtaggcgacagcctcatgggccactgtggcccgatgtccccttccttcccggccattctccctcttgttttcacttcacttttcgtgggatggtgttaccttagctaactaactctcctccatgttgcctgtctttcccagacttgtccctccttttccagcgggactcttctcatccttcctcatttgcaaggtgaacacttccttctagggagcaccctcccaccccccaccccccccacacacaccatctttccatcccaggcttttgaaaaacaaacagaaacccgtgtatctgggatatttccatatggcaataggtgtgaacagggaactcagaatacagacaagtagaaagattctcgcttaaaaaaaatgtatttattttatggcaagttggaaaatatgtaactggaatctcaaaagttctttgggacaaaacagaagtccatggagttatctaagctcttgtaagtgagttaatttaaaaaagaaaattaggctgagagcagtggctcacgcctgtaatcccagaactttgggaggctaaggtgggtggatcacctgaggtcaagagttccagaccaggctggccagcatggtgaaaccccgtctgtactaaaaatacaaaaaattaactgggcatggtagtgggtgcctgtaatcccagctacttgggaggctgaggtgggagaattgctcgaacttggaggtggaggttgtggtgagccatgatcgcaccactgcactctagcctgggtgaccgagggaggctctgtctcaaaagcaaagcaaaaacaaaaacaaaaacacctaaaaaacctgcagttttgtttgtactttgtttttaaattatgctttctattttgagatcattgcaaactcaacacaattgtaagtaatgatacagagggatcttgtgtacccttcacccagcctcccccaatggcaacatcttgcaaaactacaatgtagtctcataaccaggatattgacattgatacagtgaagatacaggacattctcatcaccacagggatccccaggatgcccacttccctccacccccacaccccagccgtgtccctaacccctggcaaccaggaatccactctccatttctataatgttgtcatttcaagaatgttattcaatggaatcatatagtatgtaacctgttttgagcttaaaaaaaaagtatacatgactttaatgaggaaaataaaaatgaatattgaaatgttgtgttatttctagtgaataattgactttgcagtaggtattagtcgattttcacactgctgataaagacatacccaagactgggaagaaaaaagagatttaattggacttacagttccacattgctggggaggtctcacagtcatggcaggaggcaaaggcactacttacatggtagtggcaagagaaaatgaggaagaagcaaaagtggaaactactgtgaaacccatcagatcttgtgagacttattaactatcacaagaatagcaagggaaagaccggaccccatgattcaattatctccccctgggtccctcccacaacacatgggaattctgagagatacaattcaaattgagatttgggtggggagacagccaaaccatatcacaatatttctgctttgattgtgtagtgtgcatgtgcatggattatctagaaatagcgtgcagaccagccagctgtggtggctcatgcctgtaatcccagcactttgggaggctgaggcaggcagatcacctgaggtcaggagtttgagaccagcctggccaacatggtgaaaccccgtctctactaaaaataccaaaattagctggtgtgttggtgcacacctgtaatctaagctacttaggaggctgaggcaggagaattgcttgaacccgggaggtggaggttgcagtgagccaagatcatgccactgcactccagcctagagtgagactctgtctcaaaaaaaaaaaaaaaaattaaatttagaactagtgtacagacccaatgtcgtccaacagaaatatgatgtgggccacatgtatatctttgttttctagtagccacattaaataagtaaaaagaaatagatgaaatacttaataatataatacaatcatatgttatattaagaacaatgaggcttatgtctgtaatcccagcactttgggaggccagcctgggcaacatagtgaggctccatcttcaaaaaaattagtctgagcatgggggctcatgcttgaaatcccagcactttgggaggctgagctgggcagatcacaaagccaggagttcgaaatcagcttggccaacatggcgaaaccccatctctactaaaaacacaaaaattagccggacatgatgatgcacgtctgtaatcccaggtactcaggaagctaaggcatgagaatcacttgaacccgggaggcagaggttgcagtgagctatgattgtggctcggcactctagcctgggcgacagagtgagactctctcagaaaaaaaaaaatttttttttttaacgaaaaaattagccggtgtggttggtagtgcctgtggtcccagctactcgggatgccgaggctggaggatcgcttgagcataggagtttgaggctgcagtgagttgtgatgctgcactccagcttgggtgacagagcaagaccctgtctccaaacaaacaaacaaacaaacaaaaaattgcctgagtgtctcgatggacagatgctgcagtctcttgagcttgcagaagtggctgtgagtggtgtctgtgcctgcttgagagtagacgttggtacctgggacaagatcctctctgtaacttgtgctcattagtgcagattccccaggcatcgaggtcacggggaaggacctgagccccagccgccttcagctcctgggggtgggctcccggcagctccctcctcaagaagacaacaccagcctcctggcctcctggccttctcccacctgctccggtctcttccatggctgcccctgacctggatagtttccctctgcctctttgctggacctttctccgcgtcctttgcagagttttttcctcttcgacgttggcgttcctcagctgtgtgtccacctcatttggtgcgctcactcctgcagcttcatccaatatcttcagcatctctcttccacactgggcctccccacccccttgccacagccagactgacctcagcagtctccccggaacctcttcctccccttccctcccgactccagagacaaccccgcggtgcacccagtcacccaggcctgagcctggggcccatcctggatgctacctccttcccgccccacgccctgcctggcccatgccctccatcctctcccatttggctctctgccttgccccttccctgatttcctggctgtccagtctgtttttcccagaccatccctgcctctattctgccttccttcaggggttacctcctccaggaatacctccctgacttcctcctctgcctccccaacccctacattctatctctattcccagtcatcctgtagctttcctggcttcgggagttgcaggcagtgggtattttctacccaccctgatttgggaaggagatagtgtcccaaaagctgggaggccaaagagtaggagtcggaggccaaggagtgggatccaggtagtctttccaaggcagcccccatctggtgttgacctgctctgcccagtatggaagtgggctgaaggggcagacaattgccaaatctgtagcttggagaatctgctgggtcaacaagttccgaaggggaagtggtagggaagggaagtggatgatgggcttggctgagtcaggctgtgtgccctttccggcacccacccccactccctgcagccctgggatcttattcacgcatctactctgcagaccgggatgcctctaagtcctggagccaaagccttctcctctttatctgtgccacgtgaccgtcctgaaccccacacctctcagagccaggaaggcatttctctagatgagcacagtcccatagaaatagactgtgagtggccgggcgcggtggctcacacctgtaatcccagggctttgggaggccgaggtgggtggatcacctgaggtcaggagttcgagaccagcctggccaacatggcaaaacctcgtctctactaaaaatacaaaaactagccaggtgtggtggcgcatgactgtagtctcagctactcgggaggctgaggcaggggaattacttgaacccgggaggcgggagttgcggcgagctgggatcgtaccactgcactccagcctgggtgacagagcaagactctgtctctaaataaataaataaataaaataaaataaaagagaaagtaatagactgtgagccaggaggcaggaggatcgcttgagcccaggagtttaagaccagcctgggcaacatagggagaccctgtctctacaaaaattaaaaacaaacaaatgaaataactgggtgtgcaggtatgcacctgtagtcccagttactcaggaggctcaggtgggagaattgtttgagctcaggagagactgaggctgtagtgagccaagatcgcaccactgcactccagcctcggtgacagagtaagaccctgtctcaaaaaaaaaaaaaaaaagaaatagaatgatatttatattttcccacaggcaagcaacagacaaaaagaaacaaaaagaatcaggtaaaattaattttgataatacattttatttaacacaatatatttaaggagtatcattttaacatgtgttcaatagaaacaaattcttgagacttcatattctgttttttttggtactgtgttttcaaaatctggtgtgtattttccactcacagcacttcttatctcggacccgaagacatttcaagtggtccgtagtctcttgtggctggtggctgcagtgttggactgctcagggccagacttccttgactaatgtatagagcatctacagaatttgaacatctaactgttggagccgtgcttctaaccctccgaggttctggtgtgatattctaggatcctgtgattcaaatagcctgtaactcacattgtaggatctattaggttcaatagtctatgattccaacattttaagagtctgtgattccaatattctagtctccagagtctttgattgattgattgattttgagacagagtcttgctctgtcacccaggctgtagtgcagtggtgcgatcttggcttactgcaacctctgcctcccaggttcaagcgattctcctgcctcagccatccgagtagctgggattacaggcacctgccatcatgcctggctaatttttttttttttttttgagacagagttttgctcttgtcacccagctggagtgcaatggcacagtctcggctcactgcaacctccgcctcccgggttcaagtgattctcctgcctcagcctcctgagtagctgggattacaggtgaccgccccacgcccagctaattttgtatttttagtagatacggggtttcaccatgttggccaggatggtctcaatctcttgacctcgtgatccacccacctcggccttccaaagtgttgagattacaggcgtgagccaccgtgcccggccgtgactgtgttttatgactctcatatatgttaagacattctctcctatgcatcaaatatcacataaatattgtttcatattatattgttcaaaagagaaaaagtctatggtcctccccatcttagtcactcatccttttaagccctgtaattccattagattgaaccctatgaaattgccaagattcagtccttttggggtgggatgtgtgtgtaacaatttatttatttgttgtttttgaaaaattgtggtgccatggcacagtggctcatgtctgtaatcccaacactttgagaggctgaggtgggaggatcacgtgagcccaagaattcgagaccagcctgggcaacatagtgataccctatctctacaaaaaaaaaaaaaaaaaaattagccaggtgtggtgacatgtacctgtagtcccaggtacttgggaggctgaggcaggaggatcgcttgagcccaggaggcagaggttgcagtgagctgagatcacaccactgcattccagcctgggtgacagagtgatccgaggtgggtggatcactaggtcaagagatcaagaccatcctggccaacatggtgaaaccccgagtctaccaaaaatacaaaattagctgggcgtagtggcacgtgcctgtagtcccagctactcaggaggctgaggcaggagaatcgcttggacacagcaggcaggtggaggttgcaatgagccaagatggagccactgccctccagcctggtgacagagcaagactctgtctaaaaacaaaaacaaaaacaaaaacaaaaaaaacgagtaaaagaaaaattgtagtaaaatgcacataacataaaatttaccattagtggcatttcatgcatttgcagtgttgtgcatccatcaccgctatcttgttccagaacattctcatcaccccaaaaggaaacccagtacccattaagcagtcactccccccccattctttgccttcaacccctggcgaccacccaggtacattctaactctacagatttgctgaaatttgaccttgtggcctgacatggtatctcatgtctgtaatctcagcacttttggaggccaaagtgggaggactgtttgaggccaggagttcaagaccagcctgggcaacatagtgagacccctgtctcttttggaaaaaaaaaaaaaaagaaagaaaaataaaaagaaattcaacctttttgacctagaaaaatgaaaatttctttttttttttttttttttgagacggagtcttgctctgtcgccccggctggagtgcagtggcacgatctcggctcgccgcaagctccgcctcccaggttcacgccattctcccgcctcagcctcctgagtagctgggactgcaggtgcccgccaccatgcccagctaattttctgtatttttagtggagacggggtttcaccatgttagccaggatggtctcgatctcctgacctcgtaatccacctgcctcggcctcccaaagtgctgggattacaggcgtgagccaccgcgcccggctgaaaaatgataatttcatatggattgacttaagaaccttttaggatggttgggtgtggtggctaatacctgtaatcccagcactttcggaggctgaagcaggtggattatttgaggtcaggagtttgagacaaccctggccaacatggtgaaaccccgtttctactaaaaatacaaaaattagctgggtatggtggcaggtgcctgtaatcccagctacttaggaggctgaggctggagaattgcttgaacctgggaggcagagggtatagtgagccaagatcacaccactgcactcgagcctgggcgacatagcaagactctgtctcaaaaaaaaaaaaaaagaaaagagaaagaaaaagaaaaaaagaagcaaaaaaaatccttgtaggatgttctcattcaaaatttctcccaggaggaaatggctggtgagttgagggggtagtgctcggcttttcacagggtggctgagagagaatcccctgcacgtacacactggcccccctcctgccttccgaggcctgtagagaccctgttcttggcccatagcaacccccagacctccaagtgacagccctcagctccagggacaccagaaaatctttgccttcccaaatctaagatttttgttttgtttttgtttttttggaaacggagtcctgctctgtcgcccaggctggagtgcagtggtgccatcttggctcattgcaacctccacctcccaggttcaaacaattctcctgcctcagcctcctgagtagctgggattacaggtactccccaaccaagcctgactaatttttttttttttttgtattttcagtagagacagggtttcacaatgttggccaggtgggtctggaactcctgacctcaaatgatccactggccttggcttcccaaagtgctgggattacagaagtaagccactgcgcccagcctcaaatctaagacacttaaaaatttgtttttttggttttttttttttgagacgcagtttcgctcttgttgcccaggctacagtgcaatggcgcgatctcggctcaccgcaacctccgcctcccaggttcaagcgattctcctgccttagcctcccgagtagctgggattacaggcgcccaccacctaggctaattttgtatttttagtagagacggggtttctccatgttggtcaggctggtcttgaactcccgacctcaggtgatccacccaccttggcatcccaaagtgctgggattacaggcatgagccaccgtgactggcaatttttttaaaattttaaattattttttcgagtcagggcctttctctgttgctcaggctggagtgcagtggtgcattcacagttcactgcagccttgagctcttgggctcaagcgatcctccctcctcagcctccacctcccacttcagcctccagagtagcaggactacaggctcgctccaacacgcctggctaattaaaacaaattctaggggggcagatgctgtggctagcacacgtaatcacggcactttggaaggccagtgtgggaggattgctcgagcctaggaattggaggcaagactaggcaacagagacagaccccatctctacaaaaagttttttaaaaaattagctgggtgtggtggcttgagcctgtagtcccaactactttgggggctgaggtgggaggattgcttgaacccaggaggtcaaggctgcggtgagctgtgatcacaccactgcactccaatctgggtgaagagtcagaccctggattaaaaaaatatatatttttcccccagagacagcatctcactatgttggtcaggctggtctcaaaatcctagcctcaagcagtcctcacacctcggcctcctaaagtgtggagattagaggtgtaagccatcctgcctggctgcaattctaagaaatgtatgttgaaaaacttagtggatgtatcaggagtttatcaagatgaagcatctgaggaacagaccatcgttaacttttcaagttaaagcaagtttgagctcccgggcgtggtggctcatgcctgtaatcccagcactttgggaggccgaggtgggcagatcatgaggtcaggagatcgagaccatcctggctaacacggcgaaaccccgtctctactaaaaatacaaaaaaaattagccgggcgtggtggcgggtgcctgtagtcccagctactcgggggggctgaggcaggagaatggtgtgaacccgggaggtggagcttgcagtgagccgagatcgcgccactgcactccagcctgggcaacagagacagactccgtctcaaaaaaaaaaaaaaaaagaaagaaaaaaagaaagtttgagctgataaagggaaggttccacctcggtttctttcctcttaatctcttcttcaggccagggcagattcccacaggagattggggctggcaggatgtccctcctctcccaaggagggggcttcccgggacagaagaggaggggaggggacttgggggatgttttcctctctgagggtccggggtgagggtcagccaacgcagggtcacctagtcagggaaacagagtggaggaagccctgggtcaaacagtgagtcccagctccttgtctcacgaacaacttcctctagcaaagtgatttcattctctaaaacaataacaaaagaagtgtgtaaatatatcccttgaatccctaaagcacgcacaaaaaaagcacaaacagaaagaactgctgaataaagaggttccaaagttggggttggagccacttcctcttgctaagcctgcgtggtatgtgtactttaagaattcacgttacagtcttgttgctgttgcgtgagcctagcgtatactatgtgccaggcactgctccggtttttttgtttttgtttttttgagacagagtctcactctgtcgcccaggctggagtgcaatggtgagatctcggctcactggaacctccgcctcctcggttcaaatgattctcctgcctcggcctcccgagtagctgggattacaggcacgcaccaccacgcccagctaatttttgtatttttagtagagatggtgttctgccatgttggccaggctggtcttgaacacttgacttcaagtgatccacctgcctcggcctcccaaagtgctgggattacagatgtgagctaccgcgcccagccagttctgtgcgttttaaatgtatccaacgctcatagcaaacatccactgcacagatgaggaagttgaggttcagaggggctgaggccctgaactttgatgagggtgtgtcgacctggaatatgaatctcatcattctggcccttgagttcttgttctcagccactgtgatatgctggaagaggttaagaattgctatcacggctgtggctcacttctgtaatcccagccctttgggaggtcgaggtgtgaggatggcttgaggctgggcaacacagcaaggccgcacctctacagaaaattttaaaaaattagccaggtatgttggtgcatgcctgtagtcctagctactcaggaggctgaggtgggaggatcacttgagcctaggagtttgaggctgcagtgaggcataatgttttcactgcacgccagtctgagcgacagagcaagactccatctctaaaaaaagtaaagcatcgctatggccaacaacatcttcccattctacagatggaaaattgaggcccaagaaaggagttgtttgtgctttttctaccactgaggcgttgggccctgcgctcagctgctgtggtctttttgtggagaatgtgaccccaggctgtcttcctcagagccgaggaggagggagggatgtttgtctgtcctgaggctgcagaagggaggggttgaacacagttagaggcctggaggtggctgggggcagctggcatgttgtgggcaaacagaatccaggccaagacctctaaggcgttaaagagcaaaccgcatgcaggtctggcttccaggaaggtgggacttcgagactagggttggggacttgggatcagccctccacccaaccgagccctctcctgccctgccagccaccccgtaattttgggttctgtgagtcacgggaagaagacaggacaaacacaccctgagagcgagacaaggccactcctattttgtactgcttataaagattcactgggactggtgaggtggcagtgctcagcagcatccgacaggagccctggcaaacaggacggatttccaggactctaccagctgccagacacggcagggagagaccccagacctcctgggtcctggctgtgggcccggattgggctcccaagtggcgtttgactcacgtggggacactcttggaagagacggtaaggatggaggctacaagggcgggaaggagggagagagagattgcatgatcttggcttctcggaatcattactttcagaatctgggaagcagaactagagtttgagaagtgcagtcttattacagccacactggaacgcacgtcacagtcctgggctcttgaattaacttgggcagcccagcagcaaagctcttgtcaaaggatctaagcattttttttctttctctttttggagacaggttttcattcttgttgcccaggctggagtgcaatggtgccatcttggctcaccgcaacctccacctcccaggttcaagggattctcttgtctcagctgggattacaagcgcatgccaccatgcctggctaattttgtatttttagtagagatggggtttctccatgttggtcaggctggtctcgaactcccgacctcaggtgatctgtccgccttggcctcccaaagtgctgggattacaggcgtgagccactgtgccctgcccaaatggtttttcacacacagatgtatgggaaacagcctctctcaaacctgcaggaattcctgcagctttcggcagatccaccaaactgtagcatgtgtagcaagcaagccctttaactcagcgattccaattcttttctctttctttccttttctctctttctttcttttgacagggtctcactctgtctcccaggctggagtgcagtggtgcgatcttggctcactgcaacctccgcctcccaggttcaagtgattctcctgccccagcctgctgagtagctgggattacaggtgcacgccaccacacctagctaatttttgtatttttagtagagatggggtttcaccatgttggccaggctggtctccaacttttgacctcaggtgatccacctaccttggcctcccaaagtgctgggattacaggcgtgaatcaccgtgcctggccccctcaatgttctatcacaaaatctgtccacattcttgtgtggtgtttgttcattctcatcgtgtagaatattccacagggtgaacaccccatgatgtgtttatccattctgctgtgggtggctatttggacggtttctcatcttgggctgctgtgaacattctggcacatgtattctggtgagcatatgtgttcttttgcggaaaggaggctgattgctgggtcgtgagggaggaatcctagaagatggatgttcaggaataaagaatgttcagactccttttttttttttttttttttgagatggagtcttgctcaggctggagtgcagtggtgcgatctcggctcactgcaacctccgcctcctgggttcacgccattctcctgcctcagcctcctgagtagctgggactacaggcgcccgccaccgcgcccagctaattttttgtattttttagtagagatggggtttcaccatgttagccaggatggtctcgatctcctgacctcgtgatccacctgcctgggcctcccaaagtgccggggattacaggtgtgagccactgcgcccggccagccttctttgattctgctccagggttttccagagcagagaacccagcaagactggatgcacagacaggcgtgcaccaagaggcacatgtgagggtgcttgcaatcacaacaaaagaaacctaagtgaccacttagtctctctgtgcctcagtttactcttttatcctttcacttaccaaatatcgaccatgcctgtgctgtgtgccaggttctgtcccagatgccagggacacagcggcacccgaggctggaaggagctgatgttgtgggatatgaggatgataatattgacctcaagggtttgtgttgagggttatatcttgtaggtcataggtgctcaataaaagccatctattattttaattattatgaaataataagaagggtacctatgatttaaaagctagatataagtacagacgctctttgacttacaatggggtcccatctctatcaacccatcgtaaggctgggcacagtggctcacgcctgtaatggcagcacttttgggaggctgaggtgggaggatttcttgagcccaggagtttgagatcagcctgggcaacagagtaagggctgtccatacagaaaaaaaaaaaaaaattagctgggcatgatggcgtgcacccgtagtcccagctactccagaggctgaggcaggaggatcagttgagcctaggaggtagaggctgtggtgagccgaggttgaaccactgaactcagcttgggtgactgaacaagacgaaaacacaaaacaaaagcccccaacattttcaacataagttgaaaatattgtaaatcaaattggatttaatacacctagcttactgaacatcatagcctactttttttttttgagacagggtctcactctgttgtccaggctggagtgcagtggcgcgatcttggctcactgcagccttgacctcacgggcgtagcctacctcaaatgtgttcagaacatttacattacccaacagcaagacaaaatcatctaagccaaatccaatttttttttttttgagatggagtctcactctgtcacccatgctggagtgcagtggtgtgatctcagctgactgcaacctccacctcccagcttcaagggattctcctgcctcggccttctgagtagctgagattacaggcactcgcccccacgcccagctaatttttttttttttttaaatctttagcagagatgagattttatcatgttggccaggctggtctcaaactcctgacctcaagtgatccgtctgcctaggactcccaaagcgttgggattacaggtgtgagcttctgcacctggccctgtttctcattattctccttaccattgttattgaatggcctttagttaataagcaccacttgggcagacagtggactgtttttgatgctttgaggacgaatggggttgatatctgtacagatagacaggaaaacagatatcgggcacgttaagtggaaaagatgaagaaatggaacaacgtatgttgaaagctcccatttctggttaagacgttacaaaggaaatgccatctacgataccattgctttgggcttacagctgggcaaattatatgcacagaaagtttcctggattgggctgggcatgttgactcacgcctgtaatcccagcactttgggaggccgaggtgggcggatcatgaggtcaggagattgagaccatcctggctaacacggtgaaaccctgtctctactaaaaatacaaaaaattagccggaagtggtagcgggcgcctgtagtcccagctactcgggagactgaggcaggagaatcatgcgaacccgggaggtggagcttgcagtgagccgagatcgcaccactgcactccagcctgggcgacagagtgatactccgtctcaaaaaaaaaaaaaaaaaaaaaaaaaaaaaaagaaagttttcgttttctggattgtaatcaacaagggccaggaagggtggagtctttgcggggtgagaggatgcgtgtggacagtgataacagcagctagcctacgtatgacacccactgaaaaccagcgctatacactcagctctacccttctaacttgttgaattcttacaacaccccctaaggcaggaatattattattcccattttactgaggcacagatagtttaggtgacttgcccaaggccacacagctggtaggaatttgagggtttttgttgttgttgtttgtttgtttgttttttatgatgcagtctcgctgttgtcgcccaggctggagtgcagtggcatgatcttggctcactgcaacctctgcctcccgggttccagcgattctcttgcctcagtctcccgagtagctggaattacaggagcccacaaccatgcctggctgatttttgtatttttagtagagaccaggtttcaccatgttgctcaggctggtcttgaactcctggcctcaagtgatccgcccacctcggcctcccaaagtgctgggattacaggtgtgagccactgtgcccggctagggggggttcagtttttaaatgctgtactctttctttctttctttccttccttccttccttccttccttccttccttccttccttccttccttccttcctttctttctttctttctttctttttctttctttcttgggacagggtctcactctgttgctcaggctggagtgcagtggcgcgatcatggctaactgcagcctcaaactcctgggctcatgtgatcttccaccccagtcttagaaaaggttgggattgcaggcacgaaccactatgcctggctaatttttaaattttttgtagagacagagggtctcactgtgttgcctaggctggtcttgaactcttggcctcaagcgatccttcctcctcaactcagcctcccaatgtactgggattacaggtgtgagccactgcacctggctaaattctgcacaccttttactctagggataaaaataatacgaaagtggaatgccagactccgaatacacacaccaagtggcctggactcttcactgctacctggcatgggggaggggagtgccccaacttcctctctgtccttcctgttgcctcaacaccagctggagtgctgagcagtgccagccaacccataatagtcagcagagagcctcagggccaggtcactctgacattgtgggggtgggggggtggggactcctgcctgggtcctgtgctacccacagctttgtctaccggagcctgtgtgccacgtgctggacaaatcttaactcctcaaggactcccaaaaccagaggtaggttcacctcaatgactcttgtttccccgatgaggaaataggcacagccagctgcaactgacacccacagtcatggaggccggggctgctcaggaccacttgctgtgctgcctgccagctctccagagcccaagatttggagatggtaatattctagggcatggggttctgcagcggggactaacacactttgaaatttacctacttagggctgggcgcggtggctcatgcctgcaatcccagcactttgggaggctgaggtgggcggatcacaaggtcaggagttcgagaccagcctggccaatatgatgaaaccccgtatctactaaaaatacacaaattagttgggcatggtggcgggtgcctgtagtcccagctactcaggaggctgaggcgggagaattgcttgaaccctggaggcggaggttgcagtgagccgagattgcgtcactgcactccagcctggatgacagagcgagactctgtctcaaaaaaaaaaattttacctacttagctgagtgatcttaggtaaattacttaacttctctgtgccttatctgtagaataaatataacaatagtgtcaaattcagacagttattataaggtttcagtgaggtcaggcacggtggctcatgcctgtaatcctagcactttgggaggccgtggcaggcagaccacttgaggtcaggaattccaaaccagcctgaccaacatggtgaaaccccgtctctactaaaaatacaaaaaattagccccgggcatggtggtgcacgcctgtaatcccagctactcgggaggcttgtggcaggagtaatgcttgaacccaggaagcagaggttgcagtgagccaaaatagcgccactgcactccagcctgggtagcagagtgagactccgtctcaaaaaaaaaaataaataaaataaaataaaacaaggtttcagtgatacagtgtttaaagctgcgtggtggccactgcctgtagtcccagctactcagggggcagaggtgggaggatcacttgagcacagagtttgaggctgcagtgagccgtgattgcaccactgcactccagcgttggcaagatggcgagaccctgtctctaaaaaaaatatatatatataaatttgccaggtgtggtggtgcacacctgtagtcccacgtactcaggaggctgaggtgggaggaccacttgagcccaggagttcgaggctgcagtgagccaagatagtgccattgcattccagcctgagtgacagagcaatatctgtccctaaaaaaaaaaaaaaagttgacacaaaacacaaaatgttcaagaaacagtggcttccaataataataattttattattattattattgtcaggcacagtggcaatcatgcctgtaatcccagcagtttgagaggctgagacaaggcaggttgcttaagccccagaattcaagaccagcatgggcaacatggtgaaaccagatgacctccaaaataataataataataataataataataataattaatcaggcatgatggtgtgcacctgtagtcctagctacttgggagggtgaggtggagggttgcttgagcccaggagatggaggctgcagtgagctgggaaagtgccgctgcagtccagtctgggctacagagccagaccctgtctcaaaaaatagtaataatatagtaataatattattgtggcccgacatggtggctcacgcctgtaatcccagcactttgggaggctgaggcaggtggatcacctgaggtcaggagttcgacaccagcctggctaacatggtgaaaccccatctctactaaaaatacaaaaattagccaggtgtggtggcatgtacctgtaatctcagctacttgggaggctgaggcaggagaattgcttgaacccaggaggcggaggttgcagtgagccgagatcatgccaccacactccagcctgggcaacagagcaaaactctgtctcaaaaaaaataaattattgctatgatagattatgtcgcttccttgctcagcaccctcctatagcacctgtctcatttggaataaatgatgatgtccttgcgttgcccacgtggccctacatgccgtggcccctgataactgtttttcatttgttttgttttgttttgtttttttctttttttgagatggagtcttgctctgttgcccaggctggagtgcactggcatgatctcagctcacagcaacctccgcctccctggttcaagtgatccctcctgcctcagcctcctgagtagctgggattacaggcgtccaccatcactccaggttatttttgtgtttttaggagagatggggtttcaccatgttggccaggctggtctcaaactcctgacctcaggtgatccacccaccttggcctcccaaattcccgtgattactggcatgagccactgtgcccggcccctgatgactctgctattgcctctcaccctctccctctggcagattccactccagccacactgggctccttgctgttcttggacatgaccgtcatgttcccacctcagggcctttgcactggctgttctcgatgcctgaaacactcttcccccagatctcgatgcatctctcccactgttccttcagatttttatgcaaatgtcaccttctcaagaagccttccctgaccatgcctgtacaactccaacatagccagcttccctgtgtgatatttttcccatagtatttattatcttctaaaatactgtggattttggattttgctcatttctttctttcttttcctatttttttttattttttgagacagagtctctctctgtcatcctggctggagtgcaggggtatgatcaagctcactcaatctcctgggctcaaatgattctcccacttcagccttttcggcagctaggatcacaggcacgcatgaccatgcctggctatgttttaaaaaattttcgtagagatggggtctccctatgttgcccaggctggtctagaactcctgacctcaagtgatcttcccaccttggcctctcaaatcgttgggattacaggcctgaaccaccgtgcccagccccaatattccaatgtactagggttctggcattgtaatattctagaattccaagatgccacttctaacaacactaagttctagaattccaattttttttttttttttttgagatggagtctcactctgtctcccaggctggagtgcagtggtgtgagctcagctcactgccacctccaccttctgggttcaagaaattctcagcctcccaagtagctgggattacaggtgcccgccaccacacccagctaatttttgtatttttagtagagacggtgtttcaccatgttggcctgtcttgaattcctgacctcaagtgatccacctgtcttggcctcccaaagtgttaagattacaggtgtgagccaccacacccggcctagaattccaatattctaaagcactggagtccttatgacgcaatattccagtttgcaaggtgctggtgggccgggctgatggacaccctagatctccagggccatggagtttcctcctctgagttttcatcgtctttctctcctgcccagacaccaggagcctgaatggggaacgattctgtcagctacgagtatggggattacagcgacctctcggaccgccctgtggactgcctggatggcgcctgcctggccatcgacccgctgcgcgtggccccgctcccactgtatgccgccatcttcctggtgggggtgccgggcaatgccatggtggcctgggtggctgggaaggtggcccgccggagggtgggtgccacctggttgctccacctggccgtggcggatttgctgtgctgtttgtctctgcccatcctggcagtgcccattgcccgtggaggccactggccgtatggtgcagtgggctgtcgggcgctgccctccatcatcctgctgaccatgtatgccagcgtcctgctcctggcagctctcagtgccgacctctgcttcctggctctcgggcctgcctggtggtctacggttcagcgggcgtgcggggtgcaggtggcctgtggggcagcctggacactggccttgctgctcaccgtgccctccgccatctaccgccggctgcaccaggagcacttcccagcccggctgcagtgtgtggtggactacggcggctcctccagcaccgagaatgcggtgactgccatccggtttctttttggcttcctggggcccctggtggccgtggccagctgccacagtgccctcctgtgctgggcagcccgacgctgccggccgctgggcacagccattgtggtggggttttttgtctgctgggcaccctaccacctgctggggctggtgctcactgtggcggccccgaactccgcactcctggccagggccctgcgggctgaacccctcatcgtgggccttgccctcgctcacagctgcctcaatcccatgctcttcctgtattttgggagggctcaactccgccggtcactgccagctgcctgtcactgggccctgagggagtcccagggccaggacgaaagtgtggacagcaagaaatccaccagccatgacctggtctcggagatggaggtgtaggctggagagacattgtgggtgtgtatcttcttatctcatttcacaagactggcttcaggcatagctggatccaggagctcaatgatgtcttcattttattccttccttcattcaacagatatccatcatgcacttgctatgtgcaaggcctttttaggcactagagatatagcagtgaccaaaacagacacaaatcctgccctcagggagctgatattcttctagtggaggaagacagactataaacaaagatatatagggccatttgcggtggctcacgcctgtaattccagggctttgggaggctgaggcaggtagatcacttgaggtcaggacttcaagaccagcctagccaatatggtgaaaccctgtctctactaaaaatacaaaaattagccgggcatggtggcgcatgcctgtagtcccagctacttgggaggctgaggcagaagaatcgttttgaacccgggaggcagaggtgacagtgagccaagattgagcccctgcactccagcctgggcgacagagcgagactccgtctcaaaaaataaataaataaaagattctatttatttatttatttttttgagatggagtctcgctctgtcgcccaggctggagtgcagtggcacaatctcggctcactgcaagctccgcctcctgagttcacgccattctcctgcctcagcctcctgagtagctgggactacaggcgcccgccaccatgcccagctaatttttgtatttttagtagagaaggggtttcaccttgttagccaggatggtcttgatctcctgacctggtgatccacccgcctcagcctcccaaagtgctgggattacaggcgtgagccaccgcacccggccaaaagattttaataggatccctctggttgctggtggaggtgagagtatggtgtaggggcagtgaagatcccagagaggaggctactgtaatggtccaagcaggaggtgatagcgatttggatcagggtaacagagctgaggtggtgagaggctgacaggtcatgcatctattttgaaggaaaggccaagtccaggctccttagctcggcattcaaggcttctctccaccactggacacacttactctctagcttctcagaccctgtagcaatcagaatcatgacccccggtgatgtccacatcttaatcccctgaacctgtgaagaggtgaccttccatggcaaaagggactttgcaggtgagattaagtaaaggatcttgagaaggggtggttatcctggattgtctgggtgggctcaatggagtcacgagggtccttttaagagggaggcaggagggtcagggtcagtcacaggaggtgacaacggaagcagatgtcatagtgacgtgaggaggtgccaagaaatgcaggcagcttccagaagctgaaacagacaaggaaacagattctctctgaagctcccagaaggaacacagacctcctgacacttttagacctctgatccgcagacctttaagaaaatacatttgtattgttttaagtcactatgtttggggtgatttgttatagcagccgtgggaagctaatacacacccttcgggctatattcacgcttctgcatctttcctgaagctgtgccactggctggaatgtccttctgatctatgttgtgcagttcaacaatcaagagccatctgtggctattcaaattcgaatcaattggccaggcctggtggctcctgcctataatctcagcactttgggaggccgaggtgggaggattgcatgagcccaggagtttgagaccagcctgggcgacatagcaagaccccatctctacaaaaaatacaaaaattagccagacgtggtggggcgtgcctgtagttccagctactgaggagggagttgcttgaatccttctgcttcaatcctccttaaagcaggtagattgcttgagcccgggaagtggagtttgcagtgagcttagatcacaccgctgcactccagcctggatgtcagaatgagactccatctcaaaaaaaaaaagaaagaaagaataaattttcatttcaaatttagttcctcgggcacactggccatagttcaagtgctcagtagccacatatggctggtgactgccatattcgacagcacagctatagaacattgccatcataacagagatttctgttacaaaatgctgttctagaatttacttttgaactctacctgctcagatcttttaaattacatggtaggccaggcatggtggctcacgcctgtgatcccagcactttcggaggcccagtcgggaggatcccttgagcccagaagctggagacctgcctgggcaacagagcaagaccccatctctacaaaaataaaaaaaagaaaattagcctggtttggtggcacatgcctgtagtgccagctactagggagactgaagtgggaggattgcttcagcctgggaggttgaggctgcagtgagccgtgatctcatcactgcactctagcctaggtgacggagcgggaccctgccgctaaataaataaataaataaataacatagtagtgatacctgtgtctgcggtcattactccagaacagcacttcacatatagtttctcctttaaggtcattctcacaacagcccagggagatagggtggcatgcttcattttataagctgaggtcctgggaggggaggtcatttacccaagatcacacagcaagaacaccagacagctggaatttgatcccagttttgactccaatgctcttgctcttcatcatcaataatttccttcaaggcgtccctcaaatgtcacttcctccaggaagccctccctgatttatgctccttccagaaagaatgggctcttcctttctctgagtctctggaacacaaggtcccagctaaactgtaaattccccaagggtaacaactggactaattttttttaatttaatttaattttatttttttgagatgaagtcttgctctgtcacccaggctggattgtagtggcacgatctcggctgaccgcaacctccacctcccgggttcaagcgattcttatgcctcagcctcccgagtagctgggattacaggcgctgccaccacacttggctaatttttgtatttttagtagagacagggtttcaccatgttggccaggctggtctcgaactcctgacctcaggtgatccacccaccttggcctcccaaagtgctgggaatacaggcatgagccaccgttcccggccttatccttgacttagaatacctaacctcctgggaatgcagcccataggtctcagccttatttcacccagctcctgttcaagatggagtcactctggttcacatgcctctgacatttccccgctcccttttataagagaacctttaatcctaagggttgtagagggaggaagatacaacttctgtgacttcttcaggctggacaggggtgacgatatacctgcctaactcttaggatctattggattcagggtagacaggagctcagtcagaaagcactggtatcactttttttttttttttttttttttgagacggagtttcactcttgttgcccaggctggagtgcaatggcacgatctcagctcaccacagcctccgcctcccaggttcaagcgattctcctgcctcagcctccccagtagctgggactacaggcgtgtgccaccaaacccagctaatgtttttttttttttatttttagtagagacggggtttctccatgttggccaggctggtctcgaactcccgacctcaggtgatccacccgcctcggcctcccaaagtgctgggattacagacatgagccaccacgcccggcctgatattttattacttagtattttactctgaattatcatgcgtgaattaagaccaaggctgtcttgtaaaataaaatttgttgtggaacaatttatacagctcctttgaggtaggaggcaggactcaactctggagatggggctcggctcgaatattggaccaaattgaggaccagctaaaacagggaggaggctgaagcaacttattatttttatttatttttattttttggagaaggagtcttgctctgttacccaggctggagtgcagtgacacgatctcggctcactgcaacctccaccttccggattcaagtgattctcctgccgcagcctcccgagtagctgggactacaggcgcatgccaccatgcccagctaatatttttgtattttttagtagagatggggtttcgccatattagccaggctggtcttgaactcctgactcaggtgatctgcccacctcggcctcccaaagtgctgggattacaggtgtgggccaccacgcctggcccgaagcaactttctatgacacgcctaccagtgtgccatgtcagtttgccattgccatggcaacacacccaggagttactgccccttcccatggcaatgaccccatgacccagaagttactgccccttccctagatatttctgcataaactgccccttaatctacatgtaattaaaaataggtataggctatttttatacctatataaataggtataggctaaaaataggtataggctgggcgtggtggctcatgtctgtaatcccagtactttgggaggccaatgcaggtggatcacctgaggtcaggagatcaagaccatcctggctaacatagtgaaaccctgtctctactaaaaatacaaaaaattagccaggcgtgttggcgggagcctgtagactcagctactcgggaggttgaggcaggagaatggcgtgaacccaggaggcggagcttgcagtgagccgagatcacaccactgcactccagcctgggtgacagagcaagactccgtctaaaaaaaaaaaatagtaagaaagaaggaaagacacaaagacagaaagaaggaaggaaagaaagcaagctgttttcccctgccttgcccctgctcacctttgaattcttttctgggcaaagccaagaaccctcgtgggctaaaaccccgctttggggcttaaagtttgcaaaatcctcccattaatctattgggaccagttgccacttaggagcattctttgataacttttacaaaacatcttttgtggtttttgaaatgttttcattttgtagatcattagcccttcttttttgaactggaatacatttcacgggaattttcaaatttaagtctgtgcaatgttacataaaatacctttgattattaaaagccatctgttttgctataacttcccttttttgttctaaagtttgtctatttctgctatttgtttttttaccatagaaatattgatttccttaagttttcaaagaaccaagttattaataatttctctaagaactagtctcaagcttgctatacaatcctatggttgatagactgtggctttcttgttgatttccatttgttgttcatttcctccaattttccttttttaaaaattataattattgtttggattatttatttatttatttatttgtttgtttgtttatttgagacagagtttctccttgtcgcccaggctagagtgcaatgatgcgatgttggctcactgcaacctccacctcctgggttcaagcgattctcttgcctcagcctcccgagaagctgggattacaggtgtccgtcatcatgcctggctaattttttatatttttagtagagacgggatttcatcatgttggcttagctggtctcgaactcctgacctcaggtaatccacctgcctcggcctcccaaagtgctgggattacaggcgtgagccaccgcacctggccttgtttggaaattttaagcagaatgcttagtccatttattcttcttcttttgataataatgtatgaattggcttctctatctctaagttgttttccagaggcttgataattatatccaacgttccacttgacatccccagttgatgtccaatgcataactcaaacaatatgctgaaaacagatcttcggattttctctctagcctctctcccacgtcttcctgatggtagtagatggtgactccatatttccaaatgctcaggccaaaaactttagagtccttcttttttttagacatagaacttttttctggccaggcacggtggctcatgcctgtaatcccagcactttgggaggccgaggtgggcggatcacgaggtcaggagatcgagaccatcctggctaacacagtgaaaccccgtctctactaaaaatacaaaaaattagccgggcgtggtggcgggcgcctgtagtcccagctatgcgggaggctcaggcaggagaatggcgggaacctgggaggcggagcctgcagtgggccgagatcgcgccaccgcactccaacctgggcgacagcgagactccgtctcagaaaaaaaaaacaacaacacttttttctttttttgagacagtctggctctgtcacccaggctggagtgcggtggtaccatcatggctcactgcagcctcagtctctcagcctcctaggttcaatcgatcctcccacctcagcctcttgagtagctgggactacaggcacacactaccatatccgactaacttttgtatttttttgtagaaacaggggttggccatattgcccaggctggtgtggaacgcctgacctcaggtgatccacctaccccggcctctcaaactgttgggattacaggcgtgagccgccgtgcccagctgtttcttctttcagttaataaaagagagggtgcattgctggctaatgagattgtttctatacttgggggtcttcctgaatgtgtgtgattgagtttattgcagagaaaggtaacagaaaatggggttgtagaaagaaaagaggtagaggctgagtgagatgccccacatctgtaatctcagtgctttgggaggccaaggcgggcggatcacttgagatcaggagctggagaccagcctggcccaaatcgtgaaacctcgtctctactaaaaatacaaaaatcagccaggtgtagtggtgtgcgcctgtaatcccagctactcgagaggctgaggcaggagaatggtttgaacttgggaggcggagattgcaatgaggtgagataacgccactgcactctagcctgggagacagtgagactatgtctcaaaagaaaaaaaaaagttcctgggccccagaccagctctctctttgggttaaaaccccggcgtcccggagctgaggcgcacgtggctatgcttggggaggagagggcggggccggggaggaggcgcttgcaagtctgtaccgcaatgcctctactggcctctagagggcgcaatcactcgaggctccgccccaagcgaggcggggcggaagcgtgctgtgcacaggcgcaagatgggtcttgggcagcccagagcttccgattggctcttctgtggtggcggggcggggtcagaacgagatggctgtgtgcgcaggcgcaagactagcgctcttgggaccggaagttaaggcgttcgcggcgtgtggtaagtgaggggggcgggacgggtgtaccgggttgtggcggcgatggctgtcggagttgggccgcttgggggtagtttggggtgcgagtccaggggcgagggaagtctcgagatgaggagaaatgtaggaggcagccgaagggccggcaaacgcggacagagatggcacctgagcgtccctgggagaacctgggcgacaggccagagaccgaaagaaatggaggcacgaaaagaagcttcgagaaactgagggactgaaagacgagggtgttgggagaggagggaagctgaaaactagagagcgtgggcgagagtgccgatgggttccagcgagagtcttagagcccacgaggccgagaggcgtggtcgcccatgaacttggggagtggagggaaaagtcggaaactgatcgtggacactagaaacagaaaaaatggaatttagatggagaaacgagacactgaatcacgggggagaccgagagatacggaaggatggagacagttgaaataggaagaaccccacaaaagctggagataatggagaacgatgctgagaaatggaaaagcgagggagtggagcccgaacccctggatttgagtggctcatgtaacactcggctactcacttagcctctctattgctcagtaaaatagggggtgatcatagtgcctgacagtcgtgagaaaagtgtgtgtgtgtatgtacataggtgtgggataggaatagatcatgcagataggataggtctgtgtgttaatgtgagtaagtaagcatgagctattactaaagcttctgatattgggagataaagtattagatggggaaatggagagaggtggtgatggagagtgaatactggaaggacaaaagggaggaaaaaaagattcaaacagaaaatgagaaagggcgtggtgactcactcctgtcatccacagcactttgggaggctgcggtgggaggatcacttgagcttgggaggtcgaggctgctgtacgccgtgattgtgccactgcacttcaggctgggtgacagagtgagaccctgtttcaaaaaaacaaaaatgaattttttttttttttttttgagatggagtttcgctcttgttgcccaggctggagtgcagtggtgcgatcttggctcactgcaacctctgcctcctgggttcaagcgagtctcctgcctcagcctccagagtagctgggattacaggcaggtgccaccaccctggctaattttgtatttttagtagagacgggatttttccatgttcgtcaggctggtctcgcactcccgacctcaggtgatctgcctgcctcagcctcccaaagtgctgggattataggcgtgagccaccatgcccggcctgaaaaagcattttttttttaatgagaaagatggagaaagtcaaatggagaactgaagagagatggagaaaggaagagttggattacagagaaaaatcagactacagaatgactcataagtgaagagagatgcgagctgactaggacagggaagagagatgagggtgatgatgaacaagacggactgaaaaagagacagaggcctgaagatggagtggagagagatggaggggacagagggggaaacaaacccactgaaggccatgagcccagggcaaataggccaagagaccaaaagatggtcagagacacagttatacagaaactagaagatgcagacaatctagaagccaaaaaagatagataccttgagaggagcgggatgctgtcagtggggcccagcatgcataagcagtttctagcctcagaagaatgctctcattttctttttctttttttttttttttttttttttttgagacagagtctcgctctgttgcccaggctggagtgcagtggctcagtcttggcttcctgcaagctctgcctccagggttcgagtgattctcctgcctcagcctcccgagtcgctgggactacccgagtagccaggtgcccgccaccacacctggctaattttttttctccagcctgggtgacagagcaagactccatctcaaaacaaaaaagactccaactgtaagcaaaaaggcattttctggtgtagctgagaagtggggggttgaagggaactaagcttcaagacctaaatgatgttgccaagcttctcttcctctccctctttcacctctccctgtggtgcagtgaccattcttgtgcctgtatctagttatttctctaggatagattttaggaaagactctgtcatgttccagagctaccacaaagagctccaggcttatatcaaacttgcctgattatgatggataaaatgagagcttttctgtcctagcaaccgagtgtaaattccacaaaagggccctgattggcccttcttggatcatgtgtccgcttctcaggccaatccttggttagagggggagtagactactaagactggccaggtctttgttacttgcctacccaataggggttctttgtcttaaaggccctcagaaccatgtagaatcgaggaagggctgttgtccaaaggaaggtggatactgtcctcagaaaagaagtaaagggttgtgccaggcaggcaaaaattacatataacacttgcaaaattttgccttttatctcaatgttctgaatctcactggaccccgggtgaagaacccttgccttattcttttcattatatcacacctctctcctattactgcctgtggagacaaggttctgctgttggttggccatgtgacctacatctctcctttaggtctcaggtgaaacatcccctcctcccaggatccttccctgattcccaagcatgggaaggaggaggaacctcctttggtgtcccacagctccctaggattctgttatcacagtccccatcactggattgtcacagtctgatgacgtgtgtgtcacatgagagatcatgtgatcatggccgtctgtgaggactctggtagtcatattcattacctcctttttctagttcagtgcttaagaaacaggctgttagaaatgtttctaaaaatgggctgggcatggtggctcacactggtaatcccaacactttgggaggctaaggtgggggaattgcttgagcccagaagtttgatatcaacctgggcaacatagtgagatctcatctctacaaacagtaaaaaattagctgggtgtggtggcatgtgcctgtagtcccagctgctcgggaggctgaggcgggaggatcgcttgagtccaggaggtcgaggctgtggtgagccatgattacggcactgcactccagcctgggaaacagagtgagaccctgcctcaaaaagaaaaaaacaaaacaaaaccaaaaaaagcaatgttcccaaaagagaattaatgtcttctgttctctctcttaagaatccagggcctgaaaacccagaatgaacttgtgtccatcccagagatcactgcagatgtcatgaggtaccctttgtgtcaccagctcaagcaggcctctggccactttatcatctgtggtggtcctgtgccgtgaccaggaggaaaaattagctctttgaagagaaagtagttctctattgcaggcactggcctcttaaattgttgcaggtggggaatggatgagaatatttgttttgggtgatcagaactgagactcctattgtggattagtaacatgcctcctcctagaacaagggagggcagggatcgccgagaccaccaccgggctcccagcgaggaagaggccttggagaaatgggactggaattgtccagagacgcgtcgcctcttggaagatgccttcttccgtgaagaggattacatccgtcagggttctgaggaatgtcagaagttttggaccttctttgaacgcctgcagagattccagaatctcaagacctccaggaaggaggagaaagaccctggacagcccaagcacagcatcccagcgctggccgacctacctcgcacttacgacccacgttaccgcatcaacctctctgttcttggccctgccacgcggggctctcagggactgggcaggcacttgcccgcggagagagtggctgagttccgccgagccctgttgcactacctggactttggccagaagcaggcatttgggcgtctggccaagctgcagcgtgagcgggcagccctccccatcgcccagtatgggaaccgcatcctgcagacgctgaaggagcaccaggtggtggtagtggccggtgacaccggctgtggcaagtccactcaggtgccccagtacctgctggctgctggcttcagtcatgtggcgtgcacccagccccggcggatcgcctgcatctcactggccaagcgtgtgggctttgagagcctcagtcagtatggctcacaggtgagtgggacgcaccaggtttccgatttttccagcgtgaccttgggggaataggttgcttgtccatatggcagtatcaataaaaatgaagcacttacccttggacccagcgatgattcttctagaactttatccacagagtggcttgtctgtggtctacatgacaaaggagctagcattaaccagtgtagcactttaacagcaaaacaatgggaaatgtcctaaaggctcatcactttttttttgagacggagtctcactctgtggcccaggctggagtgcattggtgcgatcttggctgactgcaacctctgcctcccgggttcaagcaattctcctgcctcagcctcctgagtagctgggattacaggcacccgccaccatgcccagctaatttttgtaattttagtagagacggggtttcaccatgttggtcaggctgggctcaaactcctgacctcaggtgatccacccacttcggcctcccaaagttttgggattacaggtgtgagccaccacgttgggctgcgagggtaattcttgacgatcactgcaatgcaaactgccatcttggaaggccaataatagtccttctgtctcatggtggtcatgaggatgaaatgggttgatatacataaagcacttagagtggcatataatgtcctggcacatagcagggactcaagaaaaggttattgctatatagttaatattatatatacatgaggcacagtgctagatactttctgtgcattgtcacatggaattctcacagcatctaggaggagaactataagggatggcattgcctgcccaaggtcagttggcactaagtggcagaggtgagattcaaacccaagctgttggactccagagtctgatgggtaggcatggtatttgcttagattttctttttgctttttcttttttttgagatggagtttcactcttgttgcccaggctggagtgcaatggtgcgatcttggctcactgcaacctccgcctcccgggtttaggtgattctcctgcctcagcctcccaagtagctgggattacaggcatgcgccaccacgcccggctaattttgtttgtatttttagtagagatggggtttctctatgttagtcaggcggatctcgaactccctacctcaggtgatccgcccgcctctgcctcccaaagtgctgggattacaggcgtgagccaccgcacccggcctgcttagattttcaatttgggcagggccaggggctggtacccaggctcagggtcctctcctgatcctttctttctcccaccccaggtcggctaccagatccgctttgagagcacacgttcggcggccaccaagattgtattcctgacagtggggctgctcctgcgacaaatccagcgggaacccagcctgccccagtatgaggtcctgattgtggatgaagtccatgagcggcatctccacaacgatttcctcctgggcgtcctccagcgcctgttgcccacgcggcctgacctcaaggtcatcctcatgtcggccaccatcaacatctcgctcttctccagctatttcagcaatgcccctgtggtacaggtgcctgggaggctgttccccatcacggtgagtacttccccctcctcccacatccccagacctccaacctggtctctgtccaaacctggacatgcctcttctctctgctgctgtatctcccatctctttcatttaaagatgttctctttttttaaagctaccattttctgagcattcataatcagctggttagagtgctaagtgcttgttagagtaaaagctgttacaagaagacccaaaaatggctgggcgccgtggctcatgcctgtaatcccagcactttgggaggccgaggtgggtggatcacgaggtcaggagattgagaccatcctggctaacatggtgaaaccccatctctactaaaaacacaaaaacaaaattacccaggcatggtggtgggtgcctgtagtcccagctactcgggaggctgaggcaggagagtggcgtgaacctgggaggcggagcttgcagtgagccgagatcgcgccactgcactccagcctaggtgacagagtgagactttgtctcaaaaaaaaaaaagacccaaaaatgtaaagtctcaaataagagaagtttatttctctcatataacagtgtggctggtccaggctgttgggcaactctgttccatgtggtcattcagggatccgggctcctcctttgtcattactctgccatctcactgggcaggatttctcaaagtcagcaagattgacatttcagtctggataattccttgtcgtgggggctgtcctgtgcattgtaggatatctagcagcatccctggccctacccactagatgctagtagtcttctcctctggttgtgactattaaaaatgtctccagacattgccatatgttccctctggggcaaaaccacccctaattgagaaacactgtcctagtgagttatccttgtctgtatagtcaagacttacaggaagaacttcattgtctcttgtgatttctggttccggatgcccatcaatttgccttctaagcagccataaaaaaagaaagaatgggtcgggcacggtggctggtgcctgtaatcccagcactttgggaggctaaggcagaaagatcacgaggtcaggagcccaagaccatcctggccaacatggtgaaatcccatctccactaaaaatacaaaaattagctgggcatggtgacgcacgcctgtaatcccagctacttggaaggctgaggcaggagaattgcttgaacccggaggtcgaggttgcagtgagccaagatggctccactgcactccaccctgggaacagagcaagatcccatctcaaaaaaaaaaaaaagaaagaaaagaaagagagagagagagtgcgagccgagtgtggtggctcatgcctataatcccagcactttaggaggccgaggcgggtggatcacctaaggtcaggagttcgagaccagcctggccaacaaggtaaaaccccgtctctactaaaaatgcaaaaattagctcgagtggtggtgcgcccctgttatcccagttactcaggaggctgaggtgggagaattgcttgaacctgggaggtggaggctgcagtgagccgagatcatgccactgggtgacagagcgagaccctgtctcaaaaagaatgaggctgcttcctgagaaatgttttctagggtttttgttttttgttttttgttttttttagtagagacgacgtgttgctatgttgtctgcctggtcacgcatacctgagctcaagcaatcctcccgccttggcctcccaaagagctaggattacaggtgtgagccaactatgctgggaaatcagccaaccaacctggctcaggctcagggtcctctcctggtcagccaaccaacctgatttctaggtttttaatcctggtttcatcacctagaatatttttcttgttgaagctactctaaacataagataatgcatgcattgtaagtatatagcttaattagttttcaccagttacatacatctgtgtagctagcacccaggtttagaaaagtcaaacattgccagcaccccacaagccttgcagttgctttgttactttgtctttttattacatccttcagaaattatctagctggagtgtgctgtctgtcacctgactgtttctcaattaggggtggttttgccccagagggaacatatggcaatgtctggagacatttttaatagtcacaagcagtggagaagactactagcatctagtgggtagggccagggatgctgctagatatcctacgatgcacaggacagcccccacgacaaggaattatccagactgaaatgtcaatcttgctgactttgagaaatcctgcccaatgagatggtggcataatgagaaaggagaagcctggatccctgaatgaccacatggaacagagttgcccaccagcctggacccgttgcactgtgtcttctccgttagcctgtggtctcccccgtcagcctgcagcctccccagcccattgctctgagctggagggacagggtgtgcttctacctggggctgtctcctctcaggttgtgtaccagccgcaggaggcggagccgaccacgtccaagtcagagaagctggacccgcggcctttcctgagggtgctggagtccattgaccacaagtacccgcctgaggagcggggtgacctcctcgtcttcctcagcggcatggcggagatcagcgccgtgctggaggctgcccagacctatgccagccacacccagcgctgggtggtactgccactgcacagcgccctgtctgtggccgaccaggacaaggtatcacaggaagcccgagtggggcaggcggggggtctgcatgagtcaggggtggctgcgcacaggacttgtgtaactccacaaacacagggctcgggggctgtacttgtgcaaagtcgtagccacctagtggcagagccaggctgcgaacccaggtagtctggccccggagcccatgctctaaaccagaggtcggcaaactttctataaagggtcggagtagatgatgtcagtcctatcgaccatgggctctctgtctgtcacagctactcagccccactgttgcagcatgaaagcagccataaactgagtgggtgaggctgtgttccaaaacagtttttttttttttttgaaacagggtcttgctctgttgtccaggctggagtgcagtggcacgatcagggctcactgcagccttgacttcttgggctcaagtgatcctctctccttagtctcccaagtagcaactataggtgtgtgtcactaaactccattaatttttttttctttttgggacagagtctcactctgtcgtccaggctggagtgcagtggcatgatcgtggcttactgcaatctccacctcccgggttcaagcgattctcctgcctcagcctcctgagtagctgggactacaggcacccgccaccacgtccggctaatcttttgtatattgagtagagacggggtttcgccatgttggccaggctggtctcgaactcctgacctcaagtgatctgcctgcctcagcctcccaaagtgctggggttacaggtgtgagccactgtgtccggcctccgttaatttttttttgaattttagtagcaaagaggtctcactgtgttgcgcaggctggtttcaaactcctgagctcaagcgatcctcccctagtgggggcagtgccagtttatgcttcagcagatccctctggctgccatgtgagtctacaggccagagatctgaggggaagctggagtaggatcagagtgggcgaggagaggcctggaccagggcaggggctgggctgtcggaggagggaaggatttcaagaaaagttccagatggcctggtacattggctcatgcctataatcccagcacaggaagctgagacaggaggatcactcgagctcaggagttagagaccatcctaggcaacacagtgagaccttgtctctacaaaacggaagaaaactagctgggcatggtggcatgtgcctataatcccagctacttgggaggctgatgcaggaggatcgcatgagctcaggaggtcagggctgcagtgagctgtgatcacgccactgcactccattgtaggccacagagtgggatcctgtctcaaaaaaaaaaaaaaaagttcaagatgttcaggtcgggggagcaggtgtggtggctcatgcctgtaatcccagcacattgggaggccaaggcaggcggatcacctgaggtcaagagttcaagaccagcctggccgacatggtgagaccccgtctctacttaaaatacaaaaattagccgggcatggtggcgggcacctgtaatcccagctgctcgggaggctgaggcaagataattgcttgaacccgggaggcagaggttgcagtgagccgagatcacgccactgcactccagcctgggcgacagagcaagactccgtctgagggtgggggagggcccaggatggcccaggtgatggggtggacggtgagccatctccaaaagggaggtctctgaaggaggaaagggttccagggaagctgctgacacgggggtgggcaagaaattggacacataggttagtcggggctgagttagttcctgacaccaccccctcccttcctcccaggtatttgatgtggcaccccctggagtccggaaatgcatcctctccaccaacattgctgagacctcagtcaccattgacgggatccgcttcgtagtagattccggtaaggaccaccatgagcccctacccaccacccccaaggacttaggagcatggggtccggaggtgtgcgtgtgtggcaggggcgcaccagcttggattgggaagtacagttgactttcccatatccaaaatgcttgcttgcaaccagaagtgtttggaatttcgggtttttttgaatttggaatatttgtatcaattttattatttgagtatgtcaaatccagaaatctgaaatcctccagtgagcatttcattggagggtcacgttagtgctgaaaacatttcagattttcgagcatttcagactttggatttccagaattgggatgctggaagacgatgtgtggggccatggaccaatggcaacatcttagtttttctcacaccttccaagcctgcttctgccctggggcctttgtactgttctctctgccgagagctgtctttctccaggtatccacacaggtgacgccctcacctcatttcagggcccgcataaatgtccacccgtcagagaggcccatactgtccactctgtctaagagatatcccctcctccatccgctgttgcttgtcatatgagggggattgacattctgtttgttgttgttgttgttgttgttgttgttgttgttttgagacggagtcttgctctgttgccagactggagtgcaatggtgcaagctccgcctcccgggttcaagtgattctcctgcttcagcctcccaagtagctgggattacagacatgcatcaccacgcccggctaatttttgtatgtttaggagagatggggtttcaccatgttggccaggctggtctcgaactcctgacctcaagtgctgcctgcctcagcctcccaaagtgctgggattacgggcatgagccaccacgcccagcccgacattctattttatgtgctgctctgtttgctcactttctgtcttcctgactggaatgttctctgggaagtcagcatagcatagtgtttggagacactggagcctgcctggccaggtttagtgctggctgtgtggctggggtcatgtgactgacacttcatgtatcggttggctcatctgaaaaatgacaatggcaggccgtcccggctgggcgcggtggctcacacatgtaataccagcactttgggaggccaaggcaggcaggtcacttgaagttaggagtttgagaccagcctggacaacatggtgaaactccgcccctactaaaaatacaaaaattagccaggcatggtagtgcgtgcttgtagtcccagctgctcaggaggctgaagtgggagaatcacctgagcccaggaaatcgaggctgcagtgacctgtgattgtgccactgcactcaagcctgggcaacagagcgagaccctgtttaaaaaaaaaagagagagagagaaattaaaaaaataatgtctgccaggtgctgtggctcatgcctgtaatcccagcactttgggaggctgaggcaggtggatcacctgaagtcaggagttcaagaccagcctggccaacatggtgaaaccccatctctactaaaaatacaaaaatgacccgggcatggtggcgggttcctgtaatcccagctactcaggaggctgaggcaggagaatcgcttgaactcaggaggcagagtgagccgagattgtgccattgcactccagcctgggcaataagagtgaaactccatctcaaaaaaagaaaagaaagaaaatgtaaaaaaaggttgttctgacactggaggaaatatggtgctctgttcagtcctgtgagactaggacctttgtttagctcactgctgttcccctagtgcctagtgcagtgcctggtatatagtaggtgcttaataagtatttattggataagtgaacctctgaagaaacaaagacttgggaaaataaatgaaaagatgtgtgagtgaaaggctgggtgcagtggcccacgcttgtaaccccatcactttgggagcctgaggcaggcagattgcttgagcccaggagtttgagatcagcctgtgaaaccccgtcactgcaaaaaattagccgggtgtgttggtgtgcacctttagtcccagctactcgggaggctgagctagtaggatcatcgcttgagcctgggaggttgagactgcagtgagctctgactgagccactgcactccagcctgggagacagtgagaccctgtctcaaaaaaaaaaaaaaaaaaaaaaagatgtgtgaggaaatgaaagaataaatgaacaaaatgtcagagttgggcccagaataagccctcagttagcattaacagaataaaggagtaagtgagggtgttggcgagtgacaagagccaggcgcgtggccagctgcacgtggctgccacacacagactccctttcctcattgctcccatccaggaaaggtgaaggagatgagctacgatccgcaggccaagctgcaacggctgcaggagttctggattagtcaggccagcgcagagcagcggaagggccgggcgggccgcacgggccccggagtctgcttccgcctctatgccgaatcggactatgatgccttcgccccctaccccgtcccagaaattcggagggtggccctggactcgttggtgctgcaggtgaggcatgggcagaaaggggactatatcctaactgctggcacagggaggaacctgggaggccttttttattttattttattttattttattttgagatagcgtcttgctctgtcactcaggctagagtgcagtgctgtgatcatggctcactgcagcctccatattacaggctcaaatgatcctcctacctccacctgccaagtagctgggaccacaggcacacaccaccacgcttggctaacttttaaatttttatttatttatttatttttgagacggagtctccctctgtcgcccatgctggagtgcagtggtgcgatctcggctcactgaaacctccgcctcccaggtttaagtgattctcctgcctcagccttcctagtagctgggactacaggtgtgcaccaccaagcccagttaattttttgtatttttttttagtagagatggggttacaccatgttagccaggatggtcttgatttcctgaccttgtaatccaccctcctcggcctcccaaagtgctgggattacaggcatgagccaccgcgcccggcctaactttttttatttttagtagagatcaggtcttgctatgttgcccaggctggtctcaaactcctgagctcaagtgatcttcccaccttggccttccaaagtactgggattacagccatgagccattgtgcccagccagccaggaagcatttacataggacccaaccccagagtgtcagggtcaggaaggatagggctagccaagccactgaggggaacccatcccttccaaatgtcaaaacccttgttgaggggagaattgttccttaaatccatagggtcagctgggcatggtggctcacacctgtaatcccagcactttgggaggccaaggcaggtggatcacttgataccaggagtttgagaccagcatgaccaacatggtgaaaccagtctctattaaaaatacaaaaaattagccgggtgtggtggtgtgcacctgtaagcccggctatttgggaggctgaggcaggagaattgcttgaacccaggaggtggaggttgcggtgagccgagatcacaccactgcactccagcctgggcgatagaacaagactccatctcaaaaaaaaaaaaaaaaaaaatgtccatagggtcaaaggaagaaccagtgactcaatcagaatgctttcagctgtaacaggaaacctagcaggaaagggcttttaaaaccagggtttctcaatacattttatgtcatgatttgtatctcatttgttaatttagcataggttagactgccatgacaaatacacatggtcacgaatggccaacagcggaatggtggtttacaggttggcaggcaattttctttattcagggacccagggtccttcactcttgtggctctataatctccccaggggcttttcctgcatatgtgtccagccagccaaagggtcaagggcatgggaagtgagtacaggagggtttgcgggtcgagcctgcaaatggtgcacttgccttgcactcaccactcctggtcagtcctcagtctcgtggccacgcccaaccgtgaaggaggctgggaagtgtagtccttgtgctcaggaacaaaaggaaaaggaaagttgggagcagctgatggtgtctgccacaggctcacgtgcgggtgtagcacaaaccagtggccttcctgcaggaggtgcacactattttctattctgtttgatttcatcttttaaaaaaaaaaatactagtgctgccgggcacaatgagtgactcatgcctgttatcccagcactttgggaggctgaggcaggaggattgcttgaggccaggaagtcgagaccagcctaggcaacacggtgaggccctgactctagaaaaaatttaaaaattagcccagtgtgatggcacacacctgtggtcccacgcaggaggctgaggcaggaggatcgctagagcccaggagttcgaggctgcagtgagccttgattgcatcactgcactccagcctgagtgatagagcaagaccctgtctcataaaaaaacaaagtccatggggtaggtagtcttaccctaatttttggaccagaagaaggatgcagagagagagaaaatattgccccaggtcacacagctggcaagtagtagagtcagggctccatccgaggccaccaggcgtcagagcctgcttcgtgagtggccgctggctccaggcacagtgggcgtcacctcctcctcctttaccatccggaggcagaagcaaggaactgcccttctctgtgggtctaatttttaaggccacaggaacattttctagactcctctggccagtctctcatcctctcttgtcagcagaaccgggtcatatgtgttcaccctatgccccgcaattgtctagggttgtggcattgcctgagttgatcagagcagtgtctcagccccagctgcatactagaaacacctggagaatttaaaaaaaccccaggccctgccccctgcctctttaaattgagcttctaatgtaaaggttatttatttatttatttatttatttatttatttatttttgggacagagtctcactctgtcgcccaggctggagtgcagtggtgttatctcggctcactgcaacctccacctcccaggctcaagtggttctcctgccttggcctcccgagtagctgggaccacagatgggtgccaccaggcccagctaatttttgtaattttagtagagagggagtttcaccatgttgatcaggctggtcttgaacttctgacctcaggtgatctgcctgccttagcctcccaaagtgttgggattacaggcatgagccaccgcgcccggcctataaaggtttttaaatgagtattgggtgaactcatagacggcatcaaggcttggtcagcagggaggaaggagcagcagctgcttgcaggtggacgccagaacttctagtgccctcggatcaaagccaggcaaacagacttctctgagcttccttctcgctctctggctgtcacatgagctgccttgccagcctctccttcttccagtcaccagagaggtgctgtttgcttacgtatgccacgccagaccccggggtggacatatgctgtcacttaattctcccaccatctactgcctgcctggactgctgcattaattgggattcttttggttgtaagtgagagaaatacaactgaaactattgtaggcagaaagggggatcttaccattttgtgcattcatgaggcggcatgtctaacttaggaacaatccaagaatttctccatctgctgtaggtgggcccatttccaaaaaatggacaaagtcaaaggtcacagcagttctgggttaataagatagccttccatcctggccacaaccagagaggatgctgggaatgctcttcctggctccagtctcatggaaggattctgattggtccagctcaggtcacgtgcctctcctccatggtctggggcaagatgtgctaggcagacagatacagagacagcagccctccttgcctgcctctgcacagtggatcttgacattgggaattttattttattttattttattttatttttgagatagaatctcactctgtggcccaggctggagtgcagtggtgcaatctcggctcactgcaacctccgccttccaggttcaagcaattctcctgcctcagcctcccaagtagttgagattacaggcactcgccaccacacctggctaatttttgtatttttagtagagatggggtttcaccatgttggccagtctggtctcaaactcctgacctcaagtgatccacctgctgtggcctcccaaagtgctaggattacaggcatgagccactgtgcctggctgacactgggaatttgagatggagtctcggtgtattgccaggctggagtgcagtgcagaggcgcgatctcggcttactgcgatctccacctcctgggttcaagcgattctcctgcctcagcctcccgagtagctgggattacagtcatgcaccaccactaatttttgtatttttagtagagacggggtttcaccatgttggccaggatggtcttgaactcctgacctcaagtgatccgcttgccttggcctttcaaagtgctgggattacaggcatgagccacaacgcccggccaacactaggaattttaaaacgtcatgaatttgtgatctctgagccccgctgtgctgcacagtggctcttgtgttccccaatcttgggggttttgcttctcattctagatgaagagcatgagtgtgggggacccccgaaccttccccttcatcgagcccccaccaccagccagcctggaaaccgccatcctctacctccgggaccagggggccctggacagctcagaggccctcacacccattgggtccctgctagcccagctgcctgtggacgttgtgattggtgagtacccacccccctcctgatcactcagggccccaggagcgggtatgggcacagctcactctctgagtggcctgggggcaagtctgtttcttccctgggtccagttcatttattcactcttcactgggccaggcactgttctaggtgctgggcatatagcagtggacagaacagacacaaatctctggcctcagggagctgacattttggtgaagaagaccagcaatacattaggacaataaggaaaaggcatagtagatcagatggtgcctagtgttctggagagaagaaacaacggggttggggaatggggagttgcagtttgtaatacaggcctcatgtataaggcagacctcatggggaaggtaacatctgtgcagagaaatggagatgagggctaggagccatgcaaatactagaacatgcttgccagcagaagtcgagaaacatggccggcacagtggcccacacctgtaatcccagcactttgggaggctgaggcaggtagatcacgaggtcagcagttcgagaccagcctggccaacatggtgaaaccctgtctctactaaaaatacaaaaattagctgggtgtggtggcacacgcctgtaatcccagccacttgggagggtgaggtaggagaatcgcttgaacctgggaggtagaggttgcagtgatgcagtgagccgagaccatgccattgtactctagcctgggcgacagagcgagactccatctcaaaaaaaaaaaaaaaaaaaagcaaaaacaaacaggtgagattcattttgataaaatagctgattcaacctaatatacctaaaacatcacaattttaacataatcaatagaaacatttttgcaagattttatgttattttttaccatacgacgtcttggaaatcttggtttggaccagccatgttcaactgctcagtagccatgtgtggccagaggcggccgtattggacagtgcagatggtgcatgagggtgttcgggcagtgggaacagccagtacagaggccctgtgggggcacatgcctgctgctacaggaacagtgaggagccccgtgtggctgcagtggagtgagagggagaaggtgggagatgtaaccaacagtctcatcattcattcattaaatcctttttttttttttttttttttttttgagactgagtttcgctcttgttgcccaggctggagtgcaatggtgccatctcggctcaccacaacctccacctcttgagttcaagcgattctcctgcctcagcctcccgagtagctgggattacaggcatgcgccaccatgcccggctaattttgtatttttagtagagctggggtttctctatgttggtcaggctggtcttgaactcccgacctcaggtgatctgcccgccttgacctcccaaagtgctgtgattacaggcttgagccactgctcccggtccattgaatgtgtgtgtgtgtgtgtgtatatatatacacacacacacacacacacacatacacacacatatatatacatacacacatatatatacacacacatatatatatgtttttttttctttttgagatggagtctcgctctgttgcccaggctgaagtgcagtggtgcaatcccagctcattggaacttctgcctcctggattcaagcaattctcctgcctcagcctcctgagtagctgagactgtaggtgcccgccatcatacctggctaatttttgttttgttttgttttgagacagtgtttttgctctgttgcctaggctggagtgcagtggtgtgatctcagctaactgccacctcctgtgttcaagcaattctcctgcctcagcttcatgagtagctaaaattacaggctcacgccaccacgcctggctaatttttgtatttttagtagagacggggtttcatcatgttggccaggctggtctcgaagtcctgacctcaagtgatctgcccacctcagcctcccaaagtgctgggattgcagacttgagccaccgtgcccggccagtatttgttttttcagtagagaaggagtttcaccatgttggtcaggctgatctcaaactactgacctcaagtgttctgcctgcctcccaaagtgctgggattacaggcatgagccactgcgcccggccaatatttgtttttttagtagtgtcaaggtttcaccatgtcggccgtgctggtcttgaactcctgactttaagtgatctgcccacttcggcctttcaaactgctgggattacaggtgtgagccacagctcctggcccattcattaaataatttttgagcacctgctctgtgccaggtcctagtctagatgccagagatacaacagtgaataaaacaaaactcctgccctcacggagctcacatgtaacaggggagatggacaggggcagataaatgagtgaaaacacggaatgtcagccgctgattgctgctcaggtggatgcagggcacggtgggcacagtgggggctgggagcagtgttaattggctgtcctgggaggccaattaacagtgacatctgggcagaggcctgaaggaggggaggggacagctgtccctctggccctgggtcaggtgaggagctttgaattaaatgggaagtgtttaagtggaactgggtcctaagtggctgaaggtggccagaaaattgatcagttgacctggcggttctgtgaggatctggaaagggcgggtccacagaggtcgacggagaccattttcagttcccagccctcctgatctcaggtcttcagtagccagtcacaagcagatgtggtgctcctcgtccccacgctgtgtcatcaggaatagggcgttaatcttgagggatttggggccagcagaccctctgaccctgtcgttcttgtgtgcaccgtcagtgtctcaggcactcacctgacgctgcagatgccaccaccagaggctgggtgtggcctgtggtgtctggcttgcaaggctgtttcagagaatgtgacgcaaagtgccctggttgtgcgtgagtgacaggaaagacaggctctctcgcttggattccccagcacttggggtcatgacagggcctcccttgggaggcacaggcaggtggagtacccaagatcccccaaacgcagaaagaagtcttggcttttccacagctcagacccctcccacctctctcctctgcacagcgtgtccccagctctgccccgcacccctctcttgcgggctcaaggatgtcaaaactcttcctctccctcattcctgagtcatgctcacccctcccggggagctcactgactgaggcttgttcatcttgcctgattctcctgactcaagactttctatttccagcagcctgaggcccaccatggcaggaccacccatgtatgtgtgttaacaccattaaagcccccatccttgcagcacagcagggcttcagtgtgggcaggaggctggatccgctggacttggagggctgcccaggctaagaagatggttcatttttgttttatttatttatttatttatttagagatggagtttcactctgtcctccaggctggagtgcagtggcatgatcttggctcactgcaacctccacctcccgggttcaagtgatcctcccacctcagcctcctgagtagctgggattataggcatgtgccaccacactcagtttttgtattttttagtagaaacagggtttcaccacattggccaggctagtcttgaactcctgacctcaagtgatccgccagcctcggcatccctaagtgctgggattacaggcgtgagcccctgcgcccggcttcatttttgttttggaaggaaacagggctagagcagggagaatctgaactgagaagcagaagaatgttctgtgagctcttgctgtgtgccggcgaaaggctctgtggactttccgttatttcatccttacctgctgagggcagggcctctgatcgcccccagtgtgtagatggggaaactgaggctgggcccaggaggctcctgagggcatggggaagcctggctttgatcggaggtgatggtaaatgcctcactcacattatctccctgagggctgggggcaggtgcccccacttgccctgtggggaaaacgaggctcagagaactgctgctcagggtcacagtgggaactgagaggcacggatgaccctgtgctgggcgtcctctgtgccaggtggagttctgaacgcttcacagggtgaaacacaaagcatcctcttggcagcctgaggagaggccaatgctgttgttcccccgtttacagatggggaagcagcgtcacggcgaggtggggccacttttccctggtgacagagctggggtgtcctggaataggacaggggcctgcacagtacagccccaagccctgctttactgccacctttgttttatgaggccagctttttttgtttgtttggtttttgagacgaagtcttgctctgttcactcaggctagagtgtaatggcaagatctcagctcactgcagcctccgcctccagggttcaagtgattcttctgcctcagcctcccaagtagctgggattacaggcgcctgccaccacacccagctaatttttgtatttttagtagagatggagtttcaccaggtttgccaggctggtctcgaactcctgacctcaggtgatctgcttgagtccagttttgtgacaggcactatggaaagtcagtgaaggtcaacggtgggggcgggtcagacacatgacacagaccactagttactggacaggtgggcaagggagcccccagaagtccagcgtcagctcgggcgcccagaaccaggggatgtctagatgcccgctgtggagcgctcacagatggagacagggttcacctgtctccaggtgagactcggccaccctgggagacggttcctgccacttttcctctctgtggcctcccctctgtccttcctcccctttccctacctctcccagcccctgccccatctttctccatgtcttcgccttctgtcccctcttcctcttccacttccaccttgacctaaacaaaggctgcaggagaagattcatcctgtgataagcacaggagtcagtgcctgcctgtgccagggcagagctagagggactcacttacaggtgacactctagcgcggaggagagacgtccaccgtgatgggtcaaaatgagctcctagagcaaagaccaagccagggaagcatcagagcgctgggggagtgggttgtaaatagcaaagtggggaacttggtgacaggagtagtcagcgcttagacagtatctcctgtgtgtccaaggaggcagggactggccatctccaatctacaaatggggaaactgaggcccttgcccatggccacgtgaccagaaagcacagcgcgtgggtttgaatctccatctgggtcacaagacccttagtgggcaagatggagggggtgggagcaggagggcaggcgggagggcaggctggggccccgaggggtgagggctgcgcctgtcctggcacccaggagcctcaaccccgtgtccgccgctgcagggaagatgctgatcctgggctccatgttcagcctggtggagcctgtgctcaccatcgcagccgcacttagcgtccagtcgcccttcacccgcagcgcccagagcagcccagagtgcgcggcagcacggcggccgctggagagcgaccagggtgaccccttcacgctcttcaacgtcttcaacgcctgggtgcaggtgaggctggtggtgggggccctctgtctgtcaccctgctcagggccaaggccttctgtggctgtggctcctcctcgtgtcccaccctcagccccaccctgggaggaccactgagccccccacagactgggcctgcctggggagggccatgtctccatcatccatgctttcggctcaggacagcatgtgcccaggcccggggctgagaggagcctggggtttctgaagcactgatgaaaacctgtgccacctggagaaagtccaggctccttgggaggcatctggagatccagtatatgtcccttgagtcctcaccctaaccctggccctgtagtgtagtgctgggggcccatcagtgccaaaactaccctggccctgccctcccggggttcacagcccagtgcagggagacagaccactgatgtgacagtgacaacccagagagggctggaatggggagtccagggggctgggacaacccagcggggcatctaacccagtttgtgggtagtctgggagggcttcccataggagggggcactggggctgagacctggaagcaggagagcaggtgtccctgagggatgcccattttggggctctgggtgctcggtcagcccctccctccccgcactggccaggccctgacaccctggcgtctgctcctccacccaggtgaaatctgaacggagcagaaactctcgcaagtggtgccgccgccggggcatagaggagcatcgactgtacgaaatggccaaccttcggcgccagttcaaggtgaggctcgggaggaggggtaaggccggccccactcaggcagacgtgtgtaagcacactccagaacactgcttccccttcccagacagtggtcagaccagaatcccaccctgcacccacctcccccaccacccggtgaccaggtgttggggcagctgggcagagcaaagggagcagaaatccaggagggcttcctggaggggtggaccgagtcagtggacatgcagcatcctcgggaagagctcgccctccggactggggatgctgagctggctgcatgggcatggtgttggaggcagcctacggttgtggttggccggcacatctggagccagacacctcagccacagatcccagctctgccatttctgacagcgtggccccgggtgtgttactgcttgtctctgggcctcagcttcccctcgataaaaagagaggataaaaatagcacttgccagccgggcgtggtggctcacgcctataatcctagcactttgggagggcgaggtgggtggatcacgaggtcaggagatcgtgaccatcctggacaacatggtaaaactccgtctcttctaaaaatacaaaaattagccaggcatggtggcacgtgcctgtaatcccagctacttgggaggctgaagcaggagagtcgtttgaacccaggaggtggaggttgtggtgagccgagattgagccattgcactccagcctgggcaacaagagcgaaactccactcaaaaaaaaaaaaaaaaaaagatttgggtttctcctgcgcccacacagttctgcagcttgtttcatagatactgttctccatctgagtgcagacagacctgctgttaggtccttttccatggttgtatccatggattgagaatagaataaaagggttcctggtgtaatccattctgtttggttggagatgggcaagctgaggcccagagggggcagtcacccagccgacacctccggtaccatttctggggtcccggtgttggggaccacagatgccccgattgctctgagcatgggtcccgagttctctctggctgctagagcagtgttcaggcttcattggtccccagatgctttgagaatctaatggaaagtgtgagccctttgcacccacatgcacacatacagacacacatgcacgcacaatctcctgtgtcctccatcggtcagggctcagcaggaaacagaaggtccaaccaaattgggtcacttgaggaatgttgacaagatgtgggcacggggagggcaggggtctcagattttatgggtcacaggcagctggagggtctgttgggtccagatggccaaccccgccgagccccctcctctctccacttggtcgttctgggatgaggcccaggacttggcattcccagcatgtgcctagatgccccagggctacactcagaagcactagtgcaggacgcccaccagggctgtgtgggaaagcagggccccccagacccaaggggcaggtggggcagtcagcagagcctggagccagctgtgggaaaaggcactggacgcccgcacctgcctcctcttgcccctggccccggtgttccctccactgaccagcgaggacagctctctctctggagcagcgatccatgcccagcaccatgcgaggggctgttttcagccccctttgggcactagcagccctgccactgggagggtccccatttccatgagtccagagcccactgagtctgccctgaggccctcacccctacccacctgcccctaggagctgttggaggaccacgggctgctggctggggcccaggccgcgcaggtaggggacagctacagtcggttgcagcagcgccgggagcgccgggccctgcaccagctgaaacgccagcacgaggagggcgcggggcgcaggcgcaaggtgctgcggctgcaggaggagcaggacggcggctccagtgacgaggacagggctggcccagcccccccaggggccagtgatggcgtggacatccaggtgggcgccatgggctgtggggtgtgggggtttaccaaggtgggccttggcctctcctgggggggtcccaggggacatggccctgtcctcatttcaggagccgggtttccatggacggtgcttggtcccaggtatctgcagagcctgggggtctgcggatcatggtaggagcccctcaggtcccctaagactctgcctccccgtgctccccccaggatgtgaagttcaagcttcggcatgacctggcgcagctgcaggccgctgccagctcagcccaggacctgagccgcgagcagctggctctgctgaagctggtgctgggccggggcctgtacccacagctggccgtccccgacgccttcaacagcagccgaaaggactcagaccaggtggggcctgttctgccccatcctatgttttgtcctccaacacacgaaccctgagtgcctgtcctgtgccgggaatgcagtggtgactgaaacaaccctggttctgtccccatggggctcacaacccagtgggaggacagacccatccccagacaacccagagtgggcagggcttggggagtcaagagcactataggagcccacagggggcatctgccccagatttggaggagtcagggagggcttcctggaggagggaacctgggccagagggtggaggagaggcatcctgggcagaggagagagcagataggagggcttgtgctttctctctgtcctccgcagattttccacacgcaggccaagcagggcgccgtgctgcaccccacctgcgtcttcgctggcagccccgaggtgctgcacgcacaggagctggaggccagcaactgcgacggaagccgaggtacagtgagcccaggcggaaggaacccccatccgggatgtgaggggcagggataccgtgaactcccaggcccctctggctggggctcccacaccggcccaggctggtattgacgggggcccacaggaggggaagttccagggccaggcctccctgggtagccttgggtgactcacccctgctgggcctcaccttccgcatggtggtgatagtcaacctaagccagtgtggctgtgcccagagagtgagcaccggtcagggggcctgtcctatggactctgtgagctcccaggtgggtcctgcagagggaggcccccctggcacccgtgtgcatggaagggtgtctcgctgcaggcatggctgcgtgctgggagtcacattcagatttggctgaccttcttgtctgagccaggccaccaaagccatgccgtaagcatactctttctatcgatgtgtactttgaccgggtgggacaggcgggcttctgatgggcctgggtgggccagggtgggcctgagcggtcctcctcaacctttcagacgacaaggacaagatgagcagcaaacaccagctcctcagcttcgtgtccctgctggagaccaacaagccgtacctggtgaactgcgtccgcatccctgccctccaggtgggcctctgccccaccccgcccccatgcccagatatgagagctgcgttgcccagggtggtgggtgggggcaccgcgtgggcttggaggggccacctggcacctgggctggccgcaggcgtcagccttgggccgttgctgtggctgctttttctctcattcatggacttgctcaacagttaacctgccaagtgcctgctgggtgccaggcgctgtgccaggtgccaagggcgcagcagggaaccaggcatgaagcccagcccctgccctctcgggctctagtggcaggggacagtgacagcagtagcacagtgatgccctgagcgacgtgtgggagggtggacacagggtgtggtacaagataaggccacctggtgtccccaggcagagacccaaagaggagagcgtgtggatctcggggcagagtgttccaggcagtggggtggcctgcacagaggctccgaggcagacatgtgcctggcgtgcagtcagcaagggagagcgtgtggagatgaggccagagaggcgagggagacaggaccctggggacttctcagagctgggacagggtcccagccaggagggctggcagctgccaggagggagaggagggtgctgccccggtggaggctgaggccgaactcagatcatggatgcccttgcatgggcaccggcagcagagccatgggccccatggcagccactgccctgcccctagtgctcctcgagcgtctttgtgatcctaggcctggcctcggagtcctcacgcagccctgtgggtctccctttatagaggggactgaagctcaggcaggggcggggatacgtcacctaagtcacacaccgagcaggtggccaagccagagctcctgggtcacactgccccctcctgcctcctggctcactaccagcactccccggcttgggtcccagggaacgtggaggggagagaggaacctgcaggctcctagagcctcagggttttgttgacactgcgattgccaccaacaccacaaaagccagctcagctcagtcacttctgtgtgtgtccacacctccctcgagcccgtctggtgggccaggcactgttagtgttcagtgttctggggccgggggtgcagctgtggtcaatgtcaaccaaactccccaccctcatggggctcagataggatggtagaggcagacggcaaaccaaaagggtgatgccaggtgctcatgtgagcatgggaaagcaggcagcacgcaggccgagggacagaggattggcgaccagccgggccgcaggaagcggaacagacctgctacctgaggcgctctctccctgcactggactgcttgttgagagaatctggccagctcacacctggaatcccagcaccttgggaggctgaggtgggaggattgtttgagcccaggagttcaaaggcagcctgggcaacatagggagactctatctatctctacaaaaaattttaaaaagttagctgggcgtggtgttgtgtgcctgtaatcccagctactcgggaggctgaggcaggaggattgcttgagcctgggagattgaggctgcagtgagctgtgattgttgacactgcactccagcctgggtgacagagtgagacactgtctcaaaaaataataagccgggcatggtggctcacgcctataatcccggcactttgggaggccgaggtgtgtggatcagttgaggccaggagtttgggaccagcctagccaatgtggtgaaaccccatctctactaaaaatacaaaaattagccgggtgggtggcgcgtgcctgtaatcccagctactagggaggctgaggcaggaaaatcgcttgaacctgggaggtggaggttgcagtgagccaagattgcgccattgcattccagcctgggcaacagagtgagactcatctcaaataaataaataaattaataataataataataagaagaagaagatggagaaacttcacattcacataagcaggcagaacagtatatggagccctcctgtaccatccccggtccccaaaccatccacgcatggccagtcctgccctttcctctgccctggccccagccctgaggattttccccaacatcttatgagccacagcactggtaattacagcgctgacttccgtcctcacagaggagcgtgtgctcagggtctgggctctccctgcacgtcgtgtgtgtctgagtgcctgctgtccctctgccaccctgcctgagaatgcagctgtctctctcccagcacgctcccatctgccgccccgccaccccagcccccttccctgactcagcggctgccttgttcatgccgtatccccagcacccgaaggggtgcctggtacagcgggtagatggcgggtaggtggatgcctcacatagacagggctggtgggtgggcaggagcccagccgggcagggcctgtctccaatagcgccctgcccctcccacctactccctgtcttctgccccctctctttcagtccctcctgctttttagccggtctttggacaccaatggtgactgctcccgcctggtggccgatggctggctggagctgcagctagcagacagtgaaagtgccatccgactcctggcggcttccctgcggctccgtgcccgctgggaaagtgccctggaccggcagctggcgcaccaggcccagcagcagctggaggaggaggaggaggatacgccagtcagccccaaggaggtggccaccctgagcaaggaactcctgcaattcacggcatccaaggtaccctccaccagggtgcccgtgcctccctatggccagaaggggcatccgtcactgggcttgagcctcgggaaggcctggcttcccattcactccacatgggcacatttgggggttttcaggccacagaggttcagtcacttacacaaggtcactccactggtctgggtggagctaggatttgatcccaggagcctggttccagaggccacactacccactgctgccttgtttactaagcaccttctgcaagcgtggctgatcccctcttgctaacagtaaaggacaggcagggtgtgagagggaagccgtagacgtctgcttgtggatgggaagaactgaactgagcagacttgaaaccagcccctgactcttaggtggggagtggaaattgctcgtggttctacttcatgtgggtggggtggggagaagggtacaatccaggctgacttcctggagtagaagggcttgaggacaaaggagcaggaacccagtgagccatggagaggggaccaaggctgacatgctaggaggaggaggggggaggtggccagacttgaaggttagactcaaggtctgaatggggtcccaccagtgacaggggcagaagaggggcctggggagggcaatttagatgggggtgggttatcaggtatattctagacagacccctggtcatgtgtgtctgcagccaaattgtgattggtgtaagcacttggctcccgtaactgcaaagcccgagggagggcttcaggcacagctggatccaggtgctttggcggcatctccctgagtctgtctctctccatttcctgtctctccttccttagattccttacagcctccggcggctcacagggctagaagtccagaacatgtatgtgggaccccagaccatcccagccaccccccatcttcctggcctctttggcagctccaccctgtccccccaccccacaaaggggggctacgcagtcactgacttcctcacctacaactgcctcacggtaagcatgaaccctccttccctgaaggtgggatttcaggaagaccccaccaccccgtttcaccttagtccagggacatagttcccaagtggggcccgtggccctgagggcttctgggaagggtcccgggggggcacttgggtggtgggtggcacttggcgggggcccagccctgacagctggcctgccacagaatgacacagacctgtacagcgactgtctccgaaccttctggacctgcccccactgtggcctgcatgcgcccctcacgcccctggagcgcatcgcccatgagaacacctgcccccaggccccacaggatgggcccccaggtaagcacaggactgtggggacccggccacctctgcccagccgtctgcccatcccatgatggtctcctgtgcgtgtgagcacttgctagagcttcgaggactgacgacctccacccgctggccctggctggtgccacacacaggccttgtcctgaagatcaggagcccaaggcagggagagcctggagcgccacctctttctgtctgcctgtcccctgtggtgtctctgtgttgctgtctttgtctctgtttctgtctctctgtggctatgtctcttgttatttttctctgtcctgcagctatctctgccttggtcacctccaccctgttgtcacccagggatgccacacactggggttcagtgggggagatagcactggggccacatgcctccatccccggctggctgtgtctgcctctcagtctccatgtctctccttgtgtctttctctctgtctctctcactggcagggatgcggagtaaagacagacctgtgtatttttattaatctgggagggcttcctggaggaggcaaaactgggttctccaaaggccaggagagaacctgagccccacaggtgcctggcatttgggtgcaggtagacctgtgcactggaacacgcccctcacagcctcctccttttcctcccttaggggctgaggaagctgccctcgaaaccctccagaagacatctgtcctgcagaggccctaccactgcgaggcctgcgggaaggacttcctctttacacccacagaggtgctgcgccaccggaagcagcacgtgtgagctgggccaggagccctgcccacctccgtgcagctgacctgccctccagcccaggactaggggcaggactcttgcctgaacccccagcctgggcttagccctgtggtcctgtcccagtgcagagggcctggagcacggattgtgaataaagcctcacatgctgatacacactgttaggcctgcacctgcccatccagaaagcagcagctgccttgttagtcctccccagggtctagctttccttcttcctgctgcagggtgctgcctgaggggtcctgggtaggaggggcgttagagccagcagggacctcccatgtctccagattccaggtgcaggttcttagcacctccgcagccgctctctcttgagtccatcctcagtctctcctaccccttgaagtagggggaccctgaatttgcccatccacctgggtcactttgagagttgtgcaggggggctgggagcactggtgttcacgtgggaccacaggctgcaccataagacccactcacaataaaaaaataaaaggccgagccgggcatggttgctcactcccgtaataaaaaaataaaagaacaggctgagccgggcatggttgctcactcccgtaatcccagcactttgggaggctgaggcgggtggatcgcctgaggtcaggagttcgagaccagcctggccaacatagtgaaaccctgtctctactagaaatacaaaaacttagctgggtgtggtggtgggcatctttaatcccagctactggggaggctgaggcaggggaatcacttgaacctgggaggcagaggttgcaatgagctgagatcatgccattgcactccagcctgggcgacaagagtgaaactccatctcaaaaaaaaaaaaaaaaaaatcaggctgaggcaggtggtttgcctgagctcaggagtttgagaccagcctgggcaacacggtgaaaccccatctctattaaaatacaaaaaattagctgggcgtggcagcgtgtgcctgtaatcccagctattcaggaggctgagacaggagaattgctagaacccaggaggcggaggttgcttgtgagccgagatcgtgccactgcactccagcctgggtgacagagcgagactccatctctaaaagaaaaaaagaaaatgaaaagaacaataaaatcactcaggagaaaaagaaggcacggcataggaatggaaggaggacaacctgtaggtcctacagatgcgaaaaggagaagagaatacgataaacaacgtgccacacagaaattcactcatttgaaatggaaaaaattattgaaagacactagctacccaaagctcattcaggaagaaatagataaccggaacaactctattaaggaaatgtaattcatagttaacaaagagaacaggctcagatgggctccctggtgacgtctaccaaacatggaaatgatactcgcccacacccacttggccacagcataggggaggacgcctcctgactgatgttatgaggtcagcattatcctgctgctaaaagcaggctatgacaatgcaagaaaagaaaactctaagccttatgaacatagacaaaaaccctaaataggagttcagcacatcatatttagcaatatataaatacagtacatcatggccaactggggcttattctaggaatggaaggttgatttaacatttgaaaatcaatctgattcaccatattagaaacagaaaaaaaaaaaaaggttgggcatggtggttcatgcctgtaattccagcactttgggaggccgataagggtggatcagttgagtccaggagttccagactgggatggggaacatagcaagaccctgtctctattaaaaaacacaaaaattagccaggtgtggtggtgcacgcctatagtcccagctgctcgggaggctgaggtgggaagatcacttggtgtcagaaggcagacattgcagtgagctgagattgtgccactgcactccagcctgggcaacagagcaagaccccatctcaaagaaaaaaagtatataaacccctagtcttagtcagggagatggatttgagagtcatttcccatctccttggctgcacatctcattaaagccttcttcttggcaatactcgctttagtgattggctttctgtgcgaccagcagcaggacctggactgaacccctgatttttggtaacagattccattcaacagtttttttttttttttttttttttttttttttttttttttttttgaggcagggtctcgttctgttgcccgggctggagtgcagtggtgcaatctcagcttactgcagcctccacctcctgggctcaagtgatcctcccaaatcagtctcccaagtacctgggattacaggcatgtgccaccatgcccagctaatttttgggtgtgaataggtttttttgtttgttttttgtagagagtttcaccatgatgcccaggttggtctggaaccatgggcttcctttctttccaaggaagaaggctttaatcagatgcgtggctgaggagatgggaaatcagtctcaaatccgtctccctaactaaaactaggggtttatatactttttttctttgagatggggtcttgctctgttgcccaggctggagtgcagtggcacaatctcagctcactgcaatgtctgccttctgacaccaagtgatcttcccacctcagcctcccgagtagctgggactataagcgtgcaccaccacacctggctaaattttgtgtttggtgatctgcccacctcagcttcccaaaatgctgagattacaggtgtgagccactgcacccggctcattcaacagtatttatttaatttatttatttttgaggcggagtttcgctcttgttgctgaggctggagtgcaatggctcaatctcggctcactgcaacctccgcctcccgggttcaagtggttctcctgcctcagcctcccaagtacctgggattacaggcgagtgtcaccacacccagctaattttgtatttttagtagagacgggggtttctctatgttggtcaggctggtctcgaactcccgacctcaggtgatctgcccgcctcagcctcctaaaaatgttgagattacaggcatgagccaccacgctcagcctcaacagtcttttaaaatgttcctcttgaaggctaacatgcacaaattataagtaaacagcttggtgaattttcccagatgaaacatacctgtgccagcagcacccagataaaaaaataaaacaccagcagccctccacccgctgcagcccagctcctccgtctcccaggagtgtccaatattctttttttttgagatggagttttgctcttgtcgcccaggctggagtgcaacggtgcaatctcggctccctgcaacctctgcttctgggattcaagcaattctcctgcctcagccttccgagtatgtgggattacaggcacccgccaccatgcccagctaattttgcatttttagtagagacgggttttcaccatgttggccaagttggtcttgaactactgacctcaggtgatcctcccgcctcagcctcccaaagtgctgggattacaggcgtgagccactgcacccggccgtgaccaacattcttaatctgtcctctagtgctggccactctaaaacttcacaagaatgtgctgtctgtgtctagcttcttttacccaacatgaggttgcatgggcttggttcattcattctgttccatgaattcatcacaatatatccattcttttgtccagggacatttggcttccagaaacctacccctaacaccagcccttccctccctctgcagaacaaaggccccatcagaggggacgtgctgggtgtcagcgtcagcttctgggaggaggaaggtcagagctaaggcctgaaggatgatgaggtatcaggtgggtggaggggagacgctcaggaggtgggaaaggcggaggtgcacaggcttggttccaggtacaaataacgttactaggagcacacagtacctggattttgatgaatacattgtacatttctgtcctgtatgtatccagggttataggacgtgattataggacacgcatatatgtttggttttagtggactcttaaaaattgttttccaggggccgggcacagtggcttacgcctgtaatcccagcactttgggaggcctaggcgggcagatcacctgaggtcaggagttcaagatcagcctgaccaacatggagaaaccccgtctctattgggaggccgaggcgggaggatcacaaagtcaggagatcgagaccatcctggctaacacggtgaaaccccgtctctactaaaaatacaaaaaaattagctgggcgtggtggcgggcgcctgtagtcccagctactcgggaggctgaggcaggagaatggagtgaacccgggaggcagagcttgcagtgagccaagatcgtgccactgcactccagcctggttgacagagcaagactccgtctcaaaaaagaaaaaaaaaaaaaaaaagaaaacccgtctctactaaaaatacaaaatttagccaggcatggtggcgcatgcctgtaatcccagctactccagaggctgaggcaggagaattgcttgaacccgggaggcggaggttgtggtgagctgaggttgcggtgagctgagattgcgccattgcactccagcctgggcaacaagagcaaaactccgcctcaaaaaaaaaaagaaattgttttccaggccaggtgcagtagctcacacctgtaatcccagcactttaggaggctgaggcgggcggatcacgaggtcaggagtttgagatcagcctggccaacacggtgaaaccttgtctctatgaaaaattcaaaaattagccaggtgtggtggcgggcacctgtaatcccagctacttgggaggctgaggcaggagaatcgcttgaacccaggaggtggaggttgcagtgagccaagattgcactactgcactccagcattgatgacagatctagactccatctcaaaaaaaaaaaagaaaaaaaaaaagagttgtttacatattcctgaaacaagtcgtttgttagatatgcatattgtaaatattttctccaagtctatacttgccttttcatttcattatttctattttttgtagagacaggcagggtcttgctgtgttacccaggctggtctcaaactcctggcctcaagtgatccttccgcctcagcctcccaaaatgctgggattacaggtgtgaaacagtgcgcctgacccatctttatcattttcttaacagtatcttttgcagagcagaatttgtttttttgagacagggtctcactgtgttgcccaggctggaatgcagtggtgtgatcatggctcactgcagcctcgacctgcccgggctcaggtgatcctctcacctcagcctcctgagtagctgggactagacgcacatgctaccacacctggctaatttttgtttttttttgtagagatgaggttttgccatattgcccagcctggtcttgacttcctggggctcaagtgatcctctcaccttggcatcccaaagtgctgggattacaggcatgaactactgcacctgacccacgtttatcattttcttaacagtgtcttttgcggagcagaagttgttgttgttgttgttgttttgagatagggtctcactgtgttgcccaggctggagtgcagtggcataatcacagctcactgcagcctcagcctccttgggctcaggtgattctcccagttcagcctcctgagtagctgggactacaggcaggtgccaccacacccaactaatttttgtattttttgtagagatggcatctggccatgttgcccaggctggtctcgaactgggcttaagcaatcctcccacgttggccttccaaagtgctgggattacaggtgtgagttgctgctcctggacaagagaagttttgtattttgatggaatttcaaattatcattttcttttgtcatttctactttttctgttctacctaacaaatctttgcctaccctcaagatcatgaagttttttcttatgttttcttctagtttaatagttttagatttttaatataaaccgttaggtctgtggtccatttccagttaggcattgtgtatgatgtgagttaacgctcatggctcatttttctgcatatggatgtctaatggttccagaaccattttttgaaaaaagtattcatttccccattgaattaatttaatacctttactgaaaatcagtagactaggctgggcgcagtggctcacgccagtaatcccagcactttgggaggctgaagcgggcagatcacttgaggtcaggagttcaagaccagcctggccaacatggtgaaaccctgtctgtatgaaaaatccaaaaattagctgggtgtggtggcatgcgcctgtagtcccagctacttgggaggctgaggcgggaggatcgcttgaacctgggagcagaggttacagtgagctgagatcgcaccattgcactccagcctgggcgacagagcgaaactccgtctcagagtaaataaataagcaaaaattagcctggcatggtggtgggcacctgtaatcccagctactcaggaggctgaggcaggagaatcacttgaacttgggaggcagaggttgcagtgagctgagccgagatcacgccactgccctccagcctgggcaacacagtgagactctgtctcaaaaaaaaaaagagacagattctcgctttcgctttgtcatctggggtggagtgcaatagagcaatggctcaatctcagctcactgcaacctccacttcctggattcaagtgattctcatgctgcagcctccaaagtagctggaattacaggcaagcaccaccacgcccagctaattttttatttttattattttttatttttttattttttgtagggacaggttttcactctgttggccaggctggtctcaaactcctggcttcaagtgatctgcctgcctcagcctcccaaagtgttgggattacaggcgtgagctaccgcgcctggtcggttcttctttaatttagcaatatttcataattttcagaatacagatcttgcacaaacatagtgcaggcgcccaggccacagtttcccctcaccaggggccaaccattgctgaatcacagagagccctgtgggccgggagtaggcaaggagaatgttgtcatcctcattttgtatggctgctttatcatttgtaaaaggaagttaaggatcgttcccacctcacaagttgttgttgagagttgatgcattagtccacgtgcttagagcagggattggcacataaacggttctcagcaaacatcagctacagtgatcactaaggcaacaggaaaagtaaccaacatttgactgtcactcttcttctgtgacatcagagacaaatagggctacttcccaagtcagcaatatgggtataggttttctctcttacctgctgcacccaatgagtccgtaggccctgtccttcctccctccatcttctgctgtgtgtgtgtgcgcacgtgtgtttgagacagagtcttttactgtcacccaggatggagtgcagtagtgcaatctcggctcactgcaacctccgcctcccagattcaaacaattcttgtgcctcagcctcccaagtagctgagactacaggcatgcaccaccacgcctggctaaactttttgtatttttagtagaggtggggtttcactatgttggccaggctggtcttgaattcctgggctcaagcgatcctcccacctctgcctcccaaagtgctgggattacaggcgtgagccactgcacccagccatgttttgctgtttaccccctgccagttgctgtagcagccacacactgaccatccctggaaggtgacacatgctcattttggtgacaccctcatctccaaaatgcctggctctgtttcccaatatcctttctctcttttttttttttagatggagtcttgctctgtcatgcaggctggagtgcagtggcaccatctcagctcactgcaggctctgcctcctgggttcaaatgattgtcctgcctcagcctcctgagtagctgggattataaatgcccgccaccacgcctggctaatttttgtatttttagtagagacagggattcaccatgttggccaggctggtctcgaactcctgacctcaagtgatcctcccacctcggcctcccaaagtactgggattacaggcatgagccaccatgctgggccccaatatcctttatgcaccttcctgcagtccctggatgagcccctccctccctgtgctcctcccctcctcgccaccctctcgcctccactctgcctccctgtgtaccaaaaccccacagactggatgacttgaaacaacagatctctcacattcttgggggccagaaattggaagtcaaggtgttggctgggctgagctccctcgggaacctgccaggagtcttccctgcctctctctagcttctgtcacactgccggcagtccccttttatagaagggcatgtgtcatattggaccagagcccaccctatgacctcatctgaaaagaccctttttccaaataaggtcacatgcacaggcgctgggaagaggaattagcataccctctggcgggacacaattcaacccatcctaccccgtctaatccactggagggataaagcgctagcccgactctgtcccttctctgctcagagttcttccaggacaatgaaatatcattcagcaatgaaaaggaatgacaggctgggcgtggtgactcacgcctttaatcctagctctttgggaggctgaggcttaagcccaggagatcgagaccagcctggacaacatagtgagaccccatctctacaaaagatacaaaaaatagctgggcgtggtggtatatgcctgtagtcctagctatttgagaggctgaggtgggaagatcgcttgagcctgggtgatccaggttgcagtgagccgagatcacaccactgcactcagcctgggcaacggagcgagaccctgtctctaaaaaagaaacaaaacaaaaaatacacacaaaaaaatggaatgactgacagacactacagcagtgctgcagctggaagacatgctactgaaagaagccagtcacaaagggcagtgtagcgtgattccacttacgtgaaatgtccagaataggcaaacccatggagacagaaaggggattagtggttgccgaggactgggggccggcgatcactgttaggaggttcagagtttcttttggggatgttgaaaatattctagaattgattgtggtgacaggtgcacaaccctataaatacactaaaagccattgaactgtacgctttaaatgggtgaattttatgtatgaatcaggtctcaatgaagctgttaacaaaaagaactctatggctctccagcgccccctggagggatgcaggatcattgccttccctcaaggttccaccaggccggcctcccttccgcggctccctctatcctgtcagggcctgtgcacctccgccttccccatctcctgagcttctcccctccacccacatcacgcctcatcatccttcaggtcttagctcccaccttcctcctcccggaagccgaccctgacgcccagcatgtcccctctgatggggcctttgttctgcagagggaggggaggggctggtgttaggggtggattcctggaattctttttaaaaatgtattatctttagagatagagtctcattctgttgcccaggctggagtgcagtggcacaatcacagctcactgcagcctcgacctcctgggctcaagtgatcctcctgcctcagcctcccgagtagctgggaccacaggcctgcaccaccacatctggctaattgtttaaactttttgtagagacaggtctcactatgttgcccaggctagtctcgaactcctggccttaagagattctcccacctgggcctcccaatgtgttgggattactggcatgaaccaccgcccggccaagtcatagcactctggtggctgctctgactctgctgtccaagcggtaaccacccaccttgcctttggtcattaagttctgtcacttggtccctgccaccctgagatccaattatccccattggagtcaggctttccgattcttgctctgtccacccaggctggagtgcagtggcgtaatctcagctcactgcaacctccgcctcccaggttcaagcaattctcctgcctcagcctcctgagtagccagggattacaggcacccgccaccacacccagctaattgttttgtatttttagtagagatggggtttcatcttgttggccaggctggtctcgaacccctgacctcagtgatccgcctgccttggcctcccaaagtgcagagattacaggcgagagccaccgtgcccaccataatttttgtatttgtaaagagccaggatttcaccatgttggccaggctggtcttgaactcctgatttcaggtgatccacccacttcggcctcccaaactcccactgtaagttctgacctaggaggagcgcgatcgcaacacaacaatgccgtggacacagacacggttgatagagaccagcttgtcacacaatcccaaccctagttcagtcttgtcaggcctctgagcccaagtcaagccatcacatcccctgtgacttgcacgtatacgcccaggtggcctgaagtaactgaagaatcacacaacaagtgaatatgccctgccccaccttaactgatgacattccaccacaaaagaattgaaaatagcttgttcctgccttaactgatgacactatcttgtgaaattccttctcctggctcatcctggctcaaaagctcccctactgagcaccttgtgaccccccactcctgcccgccagagaacaacccccctttttcctttacctacccaaatcctataaaacggccccacccttatctcccttcactgactctcttttccgactcagccctcctgcacccaggtgaaataaacatctttattgctcacacaaagcctgtttggtggtctcttcacatggacgcgcataaaatttggtaccatgactcggatcaggggacctcccttgggagatcaatcccctgtcttcctgctctttgctccgtgagaaaagatccacctgtgacctcaggtcctcagacccaccagcccaagaaacatttcaccaatttcaaatccggtaagcggcctctttttactctcttctccaacctccctcactatccctcaacctctttctcctttcaatcttggcaccacacttcaatctctcccttctcttaatttcaattcctttcattttctggtagagacaaaggagacacgttttatctgtggacccaaaactccggtgccggtcacggactgggaaggcagccttcccttggtgtttaatcattgcagggacacctctctgattattcacccaggtttcagaggtgtcagaccgcgcagggatgcctgccttggtctttcacccttagcggcaagtcccgcttttctgggggaggggcaagtaccccaaccccttctgtgtctctaccccttctccaccttttctagggggcaagaacccccaatcccttatttccacatcccgacccctttcccacttttctggagggtaagaacccccgaaccccttccctccgtgtctctatgctctcttttctctgggcttgcctccttcactatgggcaaccttccaccctccattcctccttcttctcccttagcctgtgttctcaagaacttaaaacctcttcaactcacacctgacctaaaacctaaaccccttgttttcttctgcaacaccgcttggccccaatacaaactgggcaatggctctaaatggccagaaaacagcactttcgatttctccatcctacaagacctaaatattttttgtcaaaaaatgggcaaatggtctgaggtgcctgacgtccaggtattcttttacacatcggtccctttctagtctctgttcccaatgcaactcgtcccaaatcctccttctttccctcccgcctgtcccctcagtcccaaccccaagcgtcgctgagtctttccagtcttccttttctacagacccatctgacctctcccctcctcgccaggccgagctaagtcccaattcttcctcagcctccgctcctccacccgataatccttctgtcgtcctcacacccagggtgtcctcacaccctgtccagcttacagtttagttccacgactagctcttccccacctgcccaacaatttcctcttagagaggtggctggagctgaaggcacagtcagggtacatgtacgtttttctctatcagacctctctcaggtgagtcagcgtttaggctctttctcatcagaccccactaaacatatacaggaattccgatatctaactctgtcctacaacttaacctggagtgacttaatatcatcctgacttctgccctctccccagatgagtgggaaagagtttttctctagcccaatctcacgctgataaccgccggcttcatgagccagacctccaggaaggcagtagagcagttccccgagagggtccccaatggaactatcaggcaaattccccaggtatagctaggtgagattacatggtttcctacctagttgaagggcttaaaaaggcagcttacaaagctgttaattatgacaaacttaaagaaactacccaaggtaaagaggaaaacccagcccagttcgtggcccacttagcagcaacacttagacgctataccgccctagacccagaagggccagaaggccgccttattcttaatatgcattttatcactcagtccactcctgacattaggaaaaaacttcaaaaattagaatctggccctcaaaccccacaacaggaattaagcaacctcgccttcaaggtgtacaataatagagaggaagcagccagatggcaacgcatttctgagttacaattacttgtctctgctgtgagacaaaacccagccatacctccagctacaagaacttcaaaatgcctaagcagcagcagtcaagcattcctacaagacttcctccatcaggatcttgcttcaagtgccagaaatctggccactgggccaaggaatgcccacagcccaggattccttccaagccatgtcccatctgtgcagggacccactggaaggcagactgcccagctcacccaggagccactcctagagcccctaaagctctggcccaaggctctctgactgcttcccagatcttctcggcttagcggctgaagactgatgctgcccgatcgcctcggaagccccctagaccatcacagacgccaagcttcatgcaactctcacagtggaaggtaagtccgtccccttcttaatcaatatggaggccacccactccacattaccttattttcaagggcctgtttccctgccaccataactgttgtgggtattgacagccaggcttctaaaccttttaaaactccccaactctggtgccaacttagacgatactctttaaagcactccttttagttatccccacctgcccagttcccttattaggccgagatattttaaccaaattatctgcttccctgactgttcctggactacagctgcatctcattgccgcccttcttcccaacccaaagcctccttcgcgtcttcctcttgtgtcccaccttaacccacaagtataagatacctctactccttccctggcaaccgatcacatgcccatcaccatcccattaaaacctaatcacccttaccccgctcaacgccaatatcccatcccacagcacgctttaaaaggattaaaacttgttatcactctcctgctacagcatggccttttaaagcctacaaactccccttacaattcccccatttcacctgtcctaaaaccagacaagccttacaggttagttcaggatctgtgccttatcaaccaaattgttttgcctatccaccccatggtgccaaacccatatactctcctatcctcaatacctccctcctcaacccattattctgttctggatctcaaacatgctttctttactcttcctttgcacccatcatcccagcctctcttcgctttcacttggactgaccctgacacccatcaggctcagcaaactacctgggctgtactgccgcaaggcttcacagacagcccccattacttcagtcaagcccaaatttcatcctcatctgttacctatctcagcataattatcataaaaacacaggtgctctccctgctgatcgtgtccaattaatctcccaaacctcaatcccttataaaacaactcctttccttcctaggcatggttagtgtggtcagaattcttacacaagagccaggaccgcaccctgtagcctttctgtccaaacaacttgaccttactgttttagcctagccctcatgtctgcgtgcagcggctgccgctgctttaatacttttagaggccctaaaaatcacaaactatgctcaactcactctctacatttctcataacttccaaaatctattttcttcctcatacctgacgcatgtactttctgctccccggctccttcagctgcactcactcttaagtcccacaattaccattgttcctggcccggacttcaatctggcctcccacattattcctgataccacacctgacccccatgactgtatctctctgatccacctgatattcaccccatttccccatatttccttctttcctgttcctcactctgatcacgcttgatttactgatggcagttccaccaggcctaatcgccacacaccagcaaaggcaggctatgctatagtacaagccactagcccgcctcttagaacctctcattttctttccatcgtggaaatctgtcctcaaggaaatcacttctcagtgttccatctgctgttctactactcctcagggattattcaggccccctcccttccctacacatcaagctcagggatttgcccccacccaggactggcaaattagctttactcaacatgccccgagtcaggaaaccaaaatacctcttagtctaggcagacactttcactggataggtacaggccttttctacaaggtctgagaaggccaccgcagtcatttcttcccttctgtcagacataattcctcagtttagccttcccacctctatacagtctgataacagaccagcctttattagtcaaatcagccaagcagtttttcaggctcttagtattcagtgaaacctttatatcccttacggtcctccgtcttcaggaaaagtagaacagactaaaggtcttttaaaaacacacctcaccaagctcagccgccaacttaaaaaggactggacaatacttttacctctttcgcttctcagaatgctgcagggtacagcctatttgagctcctgtatggacaatcctttttattaggccccagtctcattccagacaccggaccaacttagactgtgcccccaaaaaacttgtcatccctactatcttctgtctagtcatactcctattctccgttctcaactactcatacgtgccctgctcttgttcacactgccggtttacactgtttctccaagccatcacagctgatatctcctcgtgctatccccaaactgccactcttaactcctgaagtaaacaaataatctttgctggcaggactatgctgaatctccttaggcactctctaatcagatgtcctgagtcgtcccaattcttagacattttatacctgtttttctccttctcttattccatttagtttttcaattcatacaaaactgtacccaggccatcaccaataattctaaatgacaaatgtttcttctaacaaccccacaatatcaccccttaccacaaaatcttccttcagcttaatctctcccactctaggttcccacgccgcccctaatcccgcttgaagcagccccgagaaatcgcccattctctctccataccaccccccaaaaaaattttcgccgccccaacacttcaacactattttgttttatttttcttattaatataagaaggcatgaatgtcaggcctctgagcccaagccaagccatcgcatcccctgtgacttgcacgtatacgcccaggtggcctgaagtaactgaagaatcacaaaacaagtgaatatgccctacccggccttaactgatgacattccaccacaaaagaagtgaaaatagcctgttcctgccttaactgatgtcactgtcttgtgaaattccttctcctggctcatcctggctcaaaagctcccccactgagtaccttgtgaccccccactcctgcccaccagagaacaacccccctttttcctttacctacccaaatcctgtaaaacagccccgcccttatctcccttcactgactctctttttggactcagccctcctgcccccaggtgaaataaacagctttattgctcacacaaagcctgtttggtggtctcttcacacggacgcgcatgaaaagtctcatcgtcacagtcaggaacctacacagagacacacaacctataccaaggcacgtgtgacggacaccgccactcagcgacagacacacacaccacattcagcaacaggacacgggcggtgcctccagccacaccgacatccctcaaccactgccctcgaccaccacattccaagtccacaggcccagaggacacacaggggtcagacacacaccaactgcagcccccgagccccgcctgcctatcccctgggtcctcaccccacgacccaggatgcccctgaaccaggggcccctcctgctctgagatgccaacctaccatacacgcaggtccagtggctgcttcctcctctcaggaagtgggggagatatttttagttacaattaacctcccacccaatttcccttctccccaggcacatccaattggtttaattagagatgattaagttaatgagaggcatttccagattctgggaaaagggggaggaggggaagaggagagctgtcccctccccaacttcccagtgtaccagccgctgggaccccttcccagcaccaggcaggggatacactaagcaactgcctcccctctcagccgacctcaaagtcttggcctggccctgcccctcccccatattccttcccccacctgccatcaagggagggtgattgtttgaagtccttcctgctgtccacccatcacccatcccacctgagtcccggggagttttgggagagagaaactctcatcatagtcacgaaaacaatatcaggccaggtgcggtagctcacgccagtattcccagcatcttgggaggccgaggcggctggacggcttgaacccaggagttcaagaccagcctgggaacaccatgaaaagccatctctaccaacaaatataaataattagccaggcatggtggtttgtgcctgtagtctcggctgctgaggaggctaaggaaggaggattgctggagtgttggagtttgaggctgcaatgagctgtgattacagagggagaccctatctcaaaaacaaaagcaatttaaaaaattaaaaatcaggccaggcacggtggctcacatctgtaatcccagcactttgggaggccgaggcaggtggatcacttgaggtcaggagttcgagaccagcctggccaacacagcaaaaccccgtctccactaaaaattacaaaaattagccaggcctggtggtgcatgcctgtagtccaagctacttgggaggctgaggcagcagaattgcttgaacctggaaggaggaggttgtggtgagctgaaatcacacccctgcattccagcctgggcgacagagtgagactcttgtctcaaaaaaattaaataaataaataaataaaaattagaatttcagagaattctattttaagaaaaagaggctggggccgggcgtggcagctcacgcctgtaatcccagcactttgggaggccgaggcggcggatcacctgaggtcaggagttcgagactagcctggccaacatggcgaaaccccatctctacaaaagtacaaaaattagccgggcatgatggtgggtgtctgtaattccagctactcgggaggctgatgtggaagaatcacttgaacctgggaggtggaggttgcaatgagctgagatcacaccattgcactccagcctgggtgagagagacagtgagactccatctcaaaaaaaaaaaaagaaaagagaggctggaagcacagtggttagtgtccaggccctggagccaggctgcctgggttcaaatggagcccagcctcacaatctccagctgtgtgaccttggatgagccacttcacctctctggtcctgcttcctcacctgggaaatggggaccgtgatggcacccacctcctggggctgccatagggtttaacagattcccaggtatacggctcctagaacagagcctgggacacagcacttactgaagggctccataaggtcataaaagtggcagcccatgctctcatcctgtgcctgttctgctttttgtgacactcatccctttcttccttttttgagatggagtctcgctctgtcacccaggctggagtgcagtggcatgatctcagctcactgcaacctccaccttttgggttcaagggattctcctgcttcagtttgccaagtagctgggactacaggcgcccgccaccatgcccggctaatttttatatttcagtagagatggggtttcaccatgttgcccaggctgtgtcctcaagtgatttgcctcccaaaatgctgggatcacaggcgtgagccaccactcctggcctatcctaagattttgttcattcactcgtctgctcagcggatattttctttctttttttcggggggcagagggggacggaatctcgctctgttgtccaggctggagtgcagtggtatgatctcagctcactgcaacctctaccacctcctgggttcaagtgattctcctgcctcagcctgctgagtagctgggattacaggcatgtgccaccacacctggctaattttttgtattttagtagagacggggtttcgctatgttggccaggctggtcttgaactcctgacctcaagtgatcctcccacctcggcctctcaaagtgctgggattacaggcgtgagccaccgcgcccggctgagtgtggcatatcttctgtgcatcctttatgtgtgtgtatgtttccgagtgtgcatgtgcgtatttgcatgtgtgtctgtttgtagcgatgtgtgtctctgtgcaaatctctccatccaggcccaccccaaagggactccgggggtccaggaacacatttttcacggggtccttcaaaaacccacacacgtgccccttgggccttgagcacagagcagcagtgtacgtggttgggggtgcccgagagactcagaggtccaaggatggctctggggagaggatggcaaagggggcgcttggatggcggaggggctgaggggcacttgggagaggggactggaaggcagtgagccaagacgaagcagcccgggtctgaaggaaagagctcacctggcctctgaaggagaagggagggggaggccccgaagatgtgggtttccagtggggaaggggacagagagagacaaggtctgaacaagacagagacagaaagaatggctgggcgcggtggctcatacctgtaaccccagcactttgggaagtggaggtgggtggatcacctgaggtcaggagttcaagaccagccaggccaacatggtgaaactccgtctctactaaaaatacaaaaagtagccgggcgtggtagcgcatgcctgtaatcccagctactcagggggctgaggcaggagaatcgcttgaacccaggaggtggaggttgcagtgagctgagatcccagcattgcactccagcctggtgtgggcaagaaagtgagactccctctcaaaaaaaaaaaaaaaaaaaaaaaaaaaaggtaccagagggagagagacagagccaaacaggggagcgatccacactctgccttggtggtctctctctctggggggtggaggggacagagatctggaaaactgagaaccccaagggactcacactggtttctgagcctcagttttcctagttacaaaggacagcctctgcctgtgatgggcgctgacacacgtggcacagttccccatgtgtccctcgaaatacctccaccatcagcacaatcatcctacgagacaggcacggccgctctccccattctccagatgtggaaaccggggcccagccaggtgaagtcgtaacccgaggtgccatagctgttgcgttccagaggcgagattcaaacccacgtccgtccggaagccttggaagtgagggtgtgcctgcctaacctgctcatttcccatgggacagaggacgtgattggacagccacagctggtgaagtgacgcaggcgtggccctgagtcttcattctcccctgcacacacatctcttgcaggaattctgcagctccctctagttaagaggtggagtcttggccaggcctggtggctcgtttgtaatcccagcactctgggaggctcccaagtagctgaaactgcaggcgtgcaccaccatgcccaagcaattcgtttgcttgcttcgtagagatggggtctcactatgttgccaggctggtcttgaactcctggccttaagtgatccactcgccttggcctcccaaagggttgggattataggcgtgagccatcgtgcttgcagccggccaatcagtattcttattcgtgatttacgagcttcaaattggtaagaatttgaaatcttgggatagacacaagaactccagttggtggctccgtgtttttaagactttatcattaaaaaaaagaagaaattagagaagggaggtaggggggacaggagagtgaaggaatctctccaaaatgtcggatccgggcgaccctccttccctgactgcccagccaccccgtcccttctctgtcctggcggcgaggccctagccgccatcttctggggaccaaggcccaggagcccagctcgggtcccaggcagaggtgaaggcagaagtggggctcagggcctggaggccttgccggtgtccttgagagcccttggatgggcactcaggcccccatgtcccagcagggccctagggaggtaggcattgagcagaggggcctttggaggtggggtcctgaagctggaggaccaggcgggaaccagaggcaggtgtgaggctgggggtcacagccggaggctgggtctgtggagaggggaggagaggccaagtcaggagcgggcagggggcctggccccaccccagcccatctgtgcaggcctcatcagccccaatgtgagggggacacagagagagtggctggcggggaatggcacagggatgtgggagggtcacagagagaagagacgcagtgacgagaaagagggagacagagaatcagagtggaggtgagggagggagagacctacagacagagacagagaacaaggagagagacaggcagagtaggacagagacagacctggagggagtcagagagaacgacatgggaagagagagaagaagtcatgaagaaatagacgaaatggagagagagaaagagagacaggaggctgggcgcggtgactcatgcctgtaaccccaacactttgggaggcagaggcagggggatcgcttgagcccaggagttcgagaccagcctggggaacaaagcgagacccgtctctacaaaaataaaaataaaaattagccaggtatggtggcgcacgcctgtagtctcagccacttgggaggctgaggccagaggatcgcttaacctggggaggtcgaggctacagtgagccatgatcaggagtggagagacagaaaaggagacagaaaggagcagagaaaagagcccactgggcagccaggcagtgggatgagaagacccctccatcactactgaccccaaaggtcccctgacactcaccccagaccatccctacccacacttggccatgaaagagctgagtcgcccactgccctacctggcctggatacgcctgcccatctctctcccaggctcggcctccagcacccgcctccatgcataagccctgtgcaggcctccactctcatccccagggcttttctgctggccctgaattcattagccacctgtccggccgcctgcctcaacccagtccaaagagaacttcctccttgtgtgtagggggctggggctgtctcacagccacgagatttccaagctctcctggccttggcacgtgctattccctctgcagatgctcctctcctgcttcactcctcccattctgctggtctcacctccaaagtcctctcctccaggcagccctccttgaatcctctagtctgggtcagatgccccctcctccaggaagccctctctaaacacctccccccatcccaggtccaacacccgccccctgtgagctcctccagttccttggcttcaccatcccagccctgcccgttctggggcatcaccatctggggatgggtctgtccccttcactagactttgtgccccatgagggcagggctgaggctgtcatggtcactgttgtgtccccaacattacccagcacagggctgggcacagaggggctcaggggatggatggacagatggatgctaaactaaggagttaggactttgtccagatggcactagggagccacaaatggtttaatccagagagagtcaaactctgatctgggctttggaaactctaggctgcctccctaccctgggcctttgcacatgctgttccctctgcttttgtgagcagggtagacctgtgcaagtgacctcttctctctgaacctcagtcttcttatctatgaaattaaaattgttaatagtctcccctttcgggatcgttgtaaggactaaatgagaagatgctctaaagtgccgccatcataccaggccacagaagactcaaggcctgggaaagtcaaataatgccccccttccacattactccctactctgcccagtggactcctattcatccttcagtgccccatccagaggccacttcctctaggaaatcttccctgataccccagagatagctgatgactccctcctatggggaaactacgttttattgtttgaactgttacactggattgtcactggggttgccaacttccccacaagaccagaatcttctcaagatccagaccctacctgaggcatgtcaggatggagtgagggctcaatttttttttttttttttttttagatggagtctcactttattgcccaggttgatcttggctcactgtaacctccgcctcctgggttcaagtgattctcctgcctcagcctccagagtagctgggactatgggtacatgccaccacacctggctaatttttgtatttttagtagagacagggttttaccatgttggccaggctggtctcgaacttctgacctcaggtgatccacctgcctcagcctcctaaagtgctgggattacaggcgtgagctaccgtgcccagccaagggctcagtttatgtttggagatgtatcatagatgaatgggtgtatgtaggtatggatggatggatggatagtgggtggtgggtgggtggatatatggataatgggatgtgtgggtggatggatgggtgagttgatgggtaggtgggtggaagcctgggtagggaggtgggtgaatgcacagataaatgggtagatgtgtgggtggttggtcagtgtggaggtagatggatgagtgggttggcgagtggagagatgaatggagtgagtgggtgaatgtgtggtcagatgggtaatgagtgggtaggtgggtggactaggtttggatggatggattgcgggtgaatgagtaattgagtaacggatggataaagatatggatgggtgagtgagtgggtagatggatggatacatggaggaggaggatggatggatggatggatggatggacggacggacagatggatgaatatcttcccatcaagcctcagagaacccacagtacagggacccaggctgacccactactctggaagtgcccactcttggagtcctgaggtctaatggaggtttgagaattgcacaatccccagcccttagaccctcacacctctcctgcatcagcctctatagataatgccattctccttccaagttcaaactcatccccactgatcctggaagacaaaaaaaaaggagggtaagtgcgtctttcagagacacccccagatgcctctaagtctccctcaccccttcctacaccaggggatccctctaccaggatagactgagtcataagaaggtgctggccctttaagaaaaagtggagccttccgaggtattgggcttgaagtctggaagaaatgaggttgtaaggaaaagatgggggaccaggaaatctgccttggcatcacctgcttctcactaggcaagtgacacactgtattccgcttgaattgaatctcaggtgggcatctttgttttacaggtgggtcatggtgcgcaggggcggggcctagctaagggggcgaggcttacccggaggccggacggccacgtgtggctgcgtctcggtatagcccccgatgggctggccctctgggctgaaggctgcaccctgccctgcgaagggggttcagaggtgcaggctgagccccaggaagcccgggacccggctttgacgccctcctaagaaccccaggctctccgtccccgccttccccctgtacctgtgcggttggattgatcgatcataggttgcacgatgcgtctccgggcgttaatgaacctgggaggcggtcatggaaacggaggggaatgaaaagagggagtgggagagaggccaagacgaacacagagcgggccggaggacagcggcgggggaggcagagcggggcgagcaggggcagtggctctgcggggctcggggcctccgtcagcaccgcggacagcgcccgggctctcgccccgggccggcccgcgggccctcctgggccactcaccagttgttgacttgcaggatggtgagccccgtgtcctgcgccagctgtttcttctgctcctccgaggggtacgggtgctgcagccaccagcaagagtcactctgcctgcctggccggccgcagtctgaaccccaaggtctggcccaccggggtccgggggatggggagcccaggcccaggcagacgtctgggagaaccggcgcttctgagcgtctctgcgctccccaggatggagaccaagggagcctcaggcttggggcaattacatgcctgccagcccccgcctgttccagcaattagaggttaactggccagctctgattagagagactgtgttgggggagggggctcctgtggcgtgggggaggggcttcactggcgtcggggagggaagcaaagcccaggccctccctctctgaatctgtcagagtctctgtgtggccctctccctatccatttatttatttatttatttgagatggagtcttgctctgtcgccaggctggaatgcagtggcgcgatctctgctcaccgcaaactccgcctccggggttcaagggattccccgcctcagcctccccagtagctgggactacaggtgcgcgccaccatgcccgactaattttttgtattttagtagagatagggttttaccatgttggccaggatggtctcgatctcctgacctcgtgatccgcccgcctcggcctcccaaagtgttgggattacaggcataagccaccgcacccagccctccctatccatttctttctttctctttctctcttttttttaaacagggtctcactctgtcactcaggctggagtgcagtggcgccttcatggctcactgcagcctcaatctccctggctcaagcaatcctccggcctcagcctcctgagtagctgggatcacaggtgtgtgccaccatgcctggctaatttttttttttagagatggggtcttgctatgttgcccaggctggtctcgaactcctgggctcaagtgatcctcctgccatggcctccgaaagtgctgggattacaggcatgagccactgtgtctggccctccatttctctctttgtggctctcacattctctctctgactcactatctctgtgtgtgtgtgtttctgtctgtatctctctctctctctgggattcagtccgtccctgcctccgagtttctgtctgtctctgtccctctgtgactcggcctctccctgtctccatcttgctctgacttggtcctccccgaatctctgtgtctctctgttttagcctcttcctggctctatttttctcctctgtccttgaagcagtatggtgcggtggttaaggccagactgcctgcatttgaatccacttctggctgtgtgaccttaggcaagtctcctaacctctctgttcctcagtctcctcctcacctgttaaatggagataatagtagcccctccctccgagggtacactgggtggatggtgggcaggtggatgattgatgcgcgggttaatggacagttttcggggaggacttagtgagttaagtgtcctgagcggcacctgcactcaggtgacactcagtgctgctggctcctgtcacaattctccacctccatgagagtctcgaaaaatttcctgccgtctttctcccacttctgggtttctctggggtttcggtctctgtggtccacccttctccctctctccattcccaccctgcacctgggcagcagggctctcaccgagaggtgctggaacaaccaggctcgcatgatgttggtggccaccttggggaagatccccctcttcttgtttcgccgtcgctcctggtccaagtcctcatcttctccaccagaactgggagaggccacgctggtgtccagcccgtctcctgagggaaggcaggcatgctgtgtgtgtgggtagtgaagagtggaggaccagagggccccagaactctcccccaagacaacactccacaccccagccatctctgcccctctacaagtcttacttgcgatctaacttcaatcctctggttgactcccatgtttcccttccacctcccaagattctcaccttggtcactggagttgtccccactctgggaggccaggcccccactggatggacctggggtccccaaatgtacagacccactatcctcatggtctcgaatccacatattattctagaaaacaagagttagaagttagtgccaaggcggccgggcgcagtggctcacgcctgtaatcccagcactttgggaggccaaggcaggcagatcacaaggtcaagagatcaagaccatcatggctaacatggtgaaaccccgtctctactaaaaatacaaaaaattagccgggtgtggtggcatgcacctgtagtcctagctactcaggaggctgaggcaggagaatcgcttgaacccgggaggcagaggttgcagtgagccgagattgcgccactgcactccagcctgggtgacagagcaagactccgtgtcaaaaaaaaaaaaaaagttagtgccaaggctttgggcatggactctggagctaggactcctggatgggaagccagtccctgcctccttcctagctgtgtgatcttgggcaggtcacttccccactctgagcctccgtttccttaactggaaaatgaaggacaggaccaggcacggtggctcacgcctgtaatgccagcacttttggaggctgaggcaggcagatcacctgaggtcgggcatttgagaccagcctggccaacatggtgaaaccccatctctactaaaaatacaaaaaccaggctggcttgggcacagtggctcacacctataatcccagcactttgggaggccgaggcaggcggatcacctgaggtcaggagttgaagaccagcctggccgacatggtgaaactttgtctctaccaaaaatacaaaaattagctgggcatgatggtgggttcctgtaatcccagctactcgggaggctgaggcgggagaatcgcttgaacccgggagggggaggttgcagtgagccaagattgtgccactgcactccagcctggccggggtgacaaagtgagactacgtctcaaaaaaaaaaaaaaaagaaaaaggaaaagaagggccgggcgcgatggctcatgcctgtaatcccatcactgtgggaggcccaggcgggtagatcacaaggtcaggagatcgagaccatcctggctaacatggtgaaaccccgtctctactaaaaatacaaaaaattagctgggcgtggtggtgggcgcctgtagtcccagctactcgggaggctgaggcaggagaatggcatgaacctgggaggcagaacttgcagtgagccgagatcacaccaatgcactccagcctgggtgacagagtgagactccgtctcaaaaaaaagaaaaggaaaatgaaggacaataatagtcctgacagtgtgtggccagtattcaatgatgagtttgtctacacaggggctcaaacaagatgaccttacacaggtctatggcatcttatctaaaatccttggggcaagaagtgtctcaggattccgaacatttcacatttttatctttatttttagtcagtgtctcactctgtcgcccaggctggagtgtagttgcatgatctaggctcaatgcagcctctgcctcccaggttcacgtgattctcatgcctcagtctcccgagtagctgggattacaggtgcctgccaccacacctggctaatttttgtatttttagtagagacggcgtttcaccacattggccaggctggtctcgaactcctgggctcaagtgatccacccacttctgcctcccaaagtcttggataacaggcgtgagccactgcgccaggcccatttcacatttctaggcaataaatcagcgcatacaccatgcagttcgcaaccatcctaggcagggtctggggcacaacctcgtcatcaaactcatgaacatttccatagcaacatggatgagtatttaactaagtggaataaataaaggctataaatagcccctcattagttcaggtcagcttttgctgccaaatgagtttgcactaaatttatgggacaaaatccaaaactttgaagtttcagagattctggggtctcagaattgtagctaagggggtctggggctgtattatctttttcttttcttttttttttttttttgagacggagtctcgccctgtcccccaggctggagtgcaatggcatgatctcagctcactgaaacctatacctcctgggttcaggcgattctcctgcctcagcctcccgagtagctgggattacaggtgtgtgccaccatgcccggctaattttttgtatctctagtagagatggggtttcaccatgttggccaggttggtctcaaactcctgaccttgtgatccacccccctcagactcacaaatcgctgggattacaggtgtgagccaccgtgcccggccttatcttttttttttctttgaagagacagagtcttgctctgtcacctaggctggagtgcagtggtgcaatcttagctctctgcagcttcaaactcctgggcttaagcaatcctcccgcctcagcctcccaagtagctggaactacagttgcgcctggctaatttttcttattttttgtcgagatgggatttcacagtttgtccagactgctctcgaactcctgggctcaagcaatcctcctgcctcgacttcccaaagtgctgggattacagccatgaagccactgcagccagcctcacagtttctttatgcaaactccaacacactttgaggaactcaacaatcgggtaggatttaccctctacccagatctgtgccccaggaggtcagctcacccatatggactgcagtaacagttctttgtttttcagtttaacgttgggttaaatctgccaagtggttttagattaactgtattcttctaccaaaaatcttagccgctgtcaagcaatctgctcctctctccagttctggtgaccacgcctcctcccacccttcttttttttgagacagagtatcactctgtcgcccaggctagagtgcagtggcgagatctcggctcactgcagcttccgcctcccgggttcaagtgattctcctgcctcagcctcccaagtagatgggactacaggcgcacgacataacacccagctaatttgttgttgtttgtttgtttttttgagacagagtcttgccctgtcacccaggctgaagtgcaatagcgcgatcttggctcactgcaaccttcgcctcccgggttcaagcaattctcctgcctcagcctcctgagtagctgggatcagaggtgcgtgccaccacgcctgtctaattttttgttttttttatgtttagtagagacggggtttcaccatgttggcctggctggtctcaaactcctgacctcgtgatctgcccacctcagcctcccaaagtgctgggattacagtcgtgagccactgcacctggcctaagttttgtatttttagtagagccgggtttttgccatgttggccaggctggtcttgaactcctgacctcagatgatctgctcacctcggcctcccaaagtactgggattacaggcatgagccactgcgcccagccatcaccagtctacattttcctttctgtgactgcagtttgaaggtttggttgtcctgtttgtgacactgttgttgcgattcctgtgcgagtgggtataaggctccaggacttggccggctgcagtggctcatgcctgtaatcccagcactttgggaggccgaggcgggaggatcacttgaagtcaggagttcgaggccagcctggccaacatggtgaaaccccgtctctactgaacaaaaattagcccggtgtggtcgtgggcacctgtagtcccagctacccgggaggctgaggcaggggaatagcttgaacccaggaggcagagcttgcagtgagccgagatcgtgccactgcactccattccggtctgggtgacaaaacaagactccatctcaaaaaaaaaaaaaaatgtctccgggactgtgtctgggtgggtctggctgtggcgtggtcgtcataggagtgtatctgaggtggtgtggagtgggtgtgcgtgtgctgtgaagatgtcattgccaggtgtgttcacagtaggattgcctgagtgtggctctcatgcgacttctcaaggctttgcccctgtactctgtatggagctgtggcaagtcgggatccacacggctgtgctgtgtgtgttttccgtctggtgtcctaagtggataaaactgtagtgaggctgcgtctgagatggtgccaccttactgagttgctttgctgggtttgattctttttttttttttttgagatggagtcttgctctgtcgcccaggctggagtgcagtggtgcgatcctggctgactgcaagctccacctcccgggttcatgccattctcctgcctcagcctcctgagtagctgggactacaggcacccgccaccacacccagctaattttttttttttttgtatttttagtagagacggggtttcaccgtgttagccagaatggtcttgatctcctgacctcatgatccacccacctcagcctcccaaagtgctgggattacaggtgagagccaccgcacccggcctgggtttgattctttgtggccgcatctgagcctgtgagtctatttccaagtctgcgtagatgagtctggggccatgtggctgtgagtggtgtgtgcgtgtgatctcggctgcagcccgactgtgatgtggccagggtcacgtgtgtgcaagagggcaccgtggtcagtccgggcccaagtgtggttatatctgagtttgccgggcagtacctggggctgtttggctctatgtccatctgtgtggctggagcgggtgtgtgtatgcagtggacacatactcaattgagaacggcgtgcggaacccggctgtgtgttctatgctgctgtcgtatggctgggctggggggcgtgtgtgagtacccggtggacgctactgtctggctgtgagcagaaatggctgttgctgagttggtgtggctgtatgtggacctgtgtgggtgtagctgaatctgtgggtggcatctgcagccgctggtgtgcgtgtgtctgtgcactgttgcccagccgcatccgagtctgcgtagctgttgtgtagtgggtgtgtggctgtgtgcatatgcgtgccctgtgatcaggctgactgtggcttcgtctgaggctgtgtagtgcacatgcgccctcatgcggtgtccaggcacagctgtggctgcaggacgatgcctggtgcccgtcccgggcccacctggtctgggaggctggggcaggaggctgggtagtcctcgaagtcctccctgcagccgccgtcccgatcctcgatgaccaggtcgatgggcatctttcccttgaggcaggtgatgtagcggtgacagaagttgtcgcacaggtcgtggacctgggggggcaccggggtactggggggggccacccacgggggcagggcgggggtgctcagggacgggggcggcattctgcttcaactccggtggggagagagctggaaggtggggggcagaggcgacgagagggggtgggatgacaggggcaagtgagggtgtggggaggtgagacgcgctcaccttctccagctccagcaggtggaaccgcagcacctggatggcctggatcatctgaaaacgtgggcgggaggtggggggagacagagggaattgggggagggagcagggaggaagaaggaagaggaagagaaggaggaagaggagacacagagaaacagaaagagtgagacaaaatgacagggacagggagatgcagcaaagagagacaaagacaccaggtgcaagggggaaagagagaacagagatgcagcccagaattaaggaaagagcagatgttagattgagagaagcaagagacgaaaaaggacccatcacaagcggggagagctaaggtgagccatgctgactggcattcccatcctctgcctgttggcccccagctccaggccccacccacctgcaagctacatttcccagaacacttgccaaagggtttggccaataggaagccctggcaagagcttggggagcaaaggatgggagaagctgggtattcctccctcctttcttctctctctctctcttttttttttttttttttgatatggagtcttgctctgttgcccaggctggaatgcagtggtgtgatcttggctcactgcaacctctgcctcccaggttcaagcgattctcctgcctcagcctcctgagtagctgggactacaggcgtgcaccactgtgcccagctaatttttgtatttttagtagagacagggtttcatcatttggtcaggctggtctcgaactcctgacctcaggtgatctgcttgcctcagcctcccaaagtgctgggattacaagcatgagccaccgcacccggccctctttttctttctttctttctctttctctagctctctatgagagacagggtcttgccctgttgcctgggctggtatgcagtggagctgatcaagggtcactacagcctcgacctcttggggctcaagcgatcctcccgcctcagcctccaaagtagctgagaccacaggtgcatgccaccacaccccgctaattaaatgtttttgtagaggtggggtctcgctacgttgcccaggctggtctcgatccctggcctcaagctatctcctggccttggcctcccaaagtgctggcattacaggcgtgagctgccgcacccagcctcctctccttgggcagcagtccctgcgctcactttggcataggtgctgatcttctgacggatggaacatcagacactttttgagccctattctgtgccaggtgctgttccacgcacttgaatcgcattcactcattaaacccccacagcagccctccaagacagacattactaccagccacacttcacagacgggacaccaaggcacggagatgcagagtgacttgccctgggtcacagagctggtgagtggcagagctgggatttgaactcgggccatgggtcccgttctcagactctaggctgtaccacacggcacgtgggcaacaatcatgacggtttggggacatggaccaggtggccttctctctgcaccccccccaccaaccccagggatggggcgtcagggaaggagacccattggaggagggggtgtgggggagggctcgggtctcaccagattgtccagttctgggttggaggagaagaggggcctctcagagcgaacctgggagggaagagagaggccggcagggggatgtcccgccttccacccacccctcctcgctggctctctgactcggtgtgtggtgggtgggaggtgcccacctgcttggcaaaggcagcgatgtcctcgttgaaggaatcagaggagcagacgtcacctccagggggtgtccccagcccagctccggccccgtcacggggagagcatgtagccagttcacatttctcaaagaccagggccaagagggggaagagcgggtgtctggggaggcaggaaaggagagaggttgagggagaggctgggaggtggatggaggggctgccaagatgcagaacagctggggaggggacaagagacccagagagggaaggagacagagactcgtacacagagagagacagaagcagacccagggagcaaagaagcagaaagacagagagagagagacaggagcctgagacccggccccactcacccatagatctcatccttctccctcttcaggccgtcgctgtccaagcctgggggcaggggctggggaggccggtgcgggccatagggccctggtactgcgggcactgtctctgggaagctagccagggctgcggggccatccacgatgcctgggtagtgcggcagctcatcatactgggggaaggtgagaagagaagggcggagccccagggaggggtcagcaccccgagactcggctgaggagcttctctatcctggaacccaggagatgcccttctgtgtcccagaaacctgcctgtggtccccaggtgtctgagcccccaagcttgaagccctccaggtcccctggagctgcctcggtggggagtgaggaccccgtccaggcagagattcctgacatgtgggcaggaggacccagagggagagacggcagggtctggctgggagggaaaagagatggagaaagtggcgtgagaagacagtgacagagacagagagagagacagacagagagggagatccatggacacctcctgtaggaaccgcgcattgttgtacacaaagtacacatacgaagcctccctgtcttctatttcatttcacagttggcagataagcgcatcagagtaagtctcaacaacatgtcacactccactcgccacgtgaatctaccacacatgtagacacagccatacacaccaacccacgtgcacactcatgtgtcagtcacacccaaatccccccccccacacacacatgcacacacacatgcacacagcccaacaccaggcacaagaatgaatgcatgattgagacatttggcacatggatgaatgaatgaatgaggcatttagcacagggcctggctcatgctgtgagcacttgttgccggagagggtcactccgcaccaccatacagacacgattgcgcacccaagagaaacaccattatggggtaggacgaccgcgtcctgtcgtcacagaaccatgcacctgggaagccaggggcaccttcctctcatcaggtcaaatcccttcctcagtgatgaagacacggaggctcaaagaggcagcaggactcgcacgggaagaggctagaacgttcctgcctcggaccctcgcctggctgggcaccctggttctgtgtgtcccactctttccctctccctcttctcctaacttctcctgtgccctgaagttgaatccaactgctccccgctgctcaaggcactctcaccaaaagcggtcctcacagcctacccggaacccccaaaacgggcgcgcgcctcctcccctgtcttctatccccgttcccatccccagggagacaggctccgtggggccagcagcctggtgagaccacctctcccacccctgtcccactcctagccctggagaggcaggggcggcttggaacaaaagtagagcgaagggaaggacggaggagagcagaaaaaaggggggacggtgaggtgcgggcggctgagatggaggaggaagcccaggaacagaggagagagactgcgggtgggggagggcagagagagggggatagagaggcagaaagaggggggagaccagggacagagagagggggacagagaggcagaaaggaggaggagagtggggcagacagagggggacagaggggcagggagaaggagaagctaaacgatggggaggaggcgaggccgagggccaggaagagacacttgggggcagagagggggcacacagggactgggagacccaggggcggagggaggggcagagagagagcgaggtggtgtagaggacggatgggctaatgggggccagcgccggagagtgggggatgcagggacagggggtgcggaagcggccgggacgcggggtccccgccccgagacctaccctccgggccatgggctgaggccggcggcagctcctgggtccctccagagcctggccgcgggggagggcgcagcccggggccgcagcccctgacggcccgcggtgttgacgccagggggtgggcaggaggccaggcgcgcgcccccccacccccgccgccgtcagcggcaggcgccgggccgggtggggactccgcgcatggaccccggcccccgcccccagcgggggtcacggccaggagcgcatcgccgccggggcgggggcagcaggcgcaggcggggcgcccgaggccccctcctctgggccccccccgtcccttccccggctctggagggaatcgaaccgtcccgagacggacacaccggggaccgcagggggcggggggcggcccggggcgacggagggtccggcggcggctcaggggtgctggcagccgcgctccccgttcccggtctctcccttgtcttgtggaaattaaacagaaccaccaaggagcgggataggggatgagccagagtgagcctgcagagctacagcacgagggattggggttagggcagcagcagcacttccggtgggagtcggggaggggcaggctgtggggggaggagaggaagagaccgcggccctggtgcccccaggcccctcctctcctacccagggctggggttcctgctccgggtttctcagtctccctctttcccagtctctctctccttgtctctctctgtctccgcttctcccgtcctttctctcctctggctctctgttctccgagccccctggacacaccacggaccccctccctggccatctccaggggtcacgtgggaatctggagtctggtcccaccgtaggctctcccctctctgaggctcgattccccctctgcaggatgggcagtgcgctgggggcggcgggggtgggctgtggataacggagaaacagttaagctagagggtgccaggactcagggtcttggctgagtctgggggtccccatgccggcgggctctgcccccgtggctgtcctgcggtgaggctggccgtttaaggcagtccgaggggaagggtctggaggccttgcctttcctcaaggccggcgcaccccagataggggttttggagcagaaaattaatttaaatcactttttaattaaagacacaaggccctttggtctgctccacccccacctcaccctcagccaagacttggggtgagggatgcaagggttaggagtctctggctctatttgcttttttggggggtggtgcatgctaaggtccccttagcccaggctgattctgaaacctagaggagcaagtgcggcctcatctgacggccagtggtggggggcgtggacagagcaggaagggagggagggggcacctgggatggggatggggcctaactggagtggggagggaggtaactccagtgacggtgtgattcagagagagagagagacagagacagacgcgggtgggaggagagagagagagaggtgcagacagagtgagacagacaggagggggagggagtgggggacaggagctccaatagagaccctggagtcgtccctgccacccccaaaacaagagcagggggcttggactctgaagcataaatctttctaattaaagaaagagacgagctgttgggaagggagaaataagtgtgtgggagagaaattgattgggggaggatggaggatgccggcgggggacggagggagcaggggggaggctccggctttctgaggctcttcctccagtctttccctctgtctgtccatccgtctgtctgtccgtctctgtctctcgctctctctctctctctctcacacacacacacacacacacacacacacactctctctctctctctctctctctctctctctcttcctggctgtctcccttaaatagtcctgggacccttctgttcccagggggagggagcaggtggcggccaggcctggtgctggagcgggggtgcctgtgtcactgcgtcgcggctgcctgtcggctcttcgagggtgtgcttgggcctccctgtgacagtgtctggaagcgtcttccctgcccggctgagtggctccctgggtggcatcagagtgaccccagctcccagtctgcaggggtctccgccctctagccctgtcctgcacctgttttacagacgggaagcgtggagccctctatgagtagatctgggggacctcatgggtctccccagcacgggctgggcgatctctcagcggactggcccttcagtgccccaacctgagcaccgaccactggggctatgcccaccaggcagccacgtcccccggggatccgcagtggtccccaggatcccctctgaaagcctacaggagcagaccgaatgaacgaggatccaccttgggttcctcctgtcctctctctcgggcctgctagcctcctgcctcggtttcccctctttatcaaccgctctgtgtctgtctctctccttctgggggcccaggtttgcttcctcctcctcattccaggctctctctgagaatctgtgtctctgctcaggagggtgggggaagaagggaccctaaaagacaggccgtctctgtctccatctccgcctgggctatgtctgtctgtctgtcacctgggctgtgtctgtctgtctgtctcctggctttttttttttttcttgtatctctgtgtctctttgtctggatgtcttctctgcctcatctttcttatctctctttctctccatctttctcggtctctctctccaggggcctctgtctcttctccctccttcctctccctctctccgcctccctgtcccccccaccgtatcctccctgggcttctgtctccctggctctctcccctctcctccacccgggcccttcataaatacatcgcccccttcccgtcctcccgctgcctggcccagctccaggagaaggaaacatttatcttggtgggggcgcccacccctgcgcccgcccctccgcccgctggccacgccatccatcacccgagcccagactcctgtggctcattcgtcaccggccctgacaaatgcctgccgcccccttcccctcccgccccaccaagcaatcataccattagccacggctcagcggtggcgggaaggacccggcctgacccgggcggggggcggggcacaggctgcggctcccaccgagacccctctctccctcttttccttccctttctatctctcctcgccctctccgtcttttttgttggaatctgctttcctctgccagtttctcgctgtgcctctgggtcctgtctccggtccgtcctcctcctcatcctccttttcctcaccctctctccttctctccttctgtctctgtctctctcttactgagtctctttccagttctgactctgtctctgtgtctctctataactgtatctctctgtctctgcccgtctgtctctccctctctgtctctcatctctctctgtctctccctctctgcctctccatctctctctctgtctctccactctgtctctccctctgtctctccctctctgtgtctcttcatctctctgttgctccctctctctctgtctctccatctctgtctctccctctctctctgtctctccatctctctgtctctccatctctctctgtctctccatctctgtctctctatctctctctgtctctccttctctctctgtctcttcatctctgtctctccctctctgtctctccatttctttctctgtctctccatctctctgtctctacctctctctccatctgtctctccctcttgctctctgtctctccatttctctctgtgtctctccttctctgtctcttcatctctatctctccctctctgtctctccatttctctctgtctctctctttctgtctctccctctctctccctctctctctgtctctccctctctctccatctctctctgtctctccctcttggggtctgtctctccatttctgtctgtctcaccatctctctgtctctccatttctctctgtctctgtctctctctgtctctccatttctctctctgtccctccctctctctctgtctctccatctctctctgtctctccatctctctctgtctctccctctgtctctgtgtgtctctctccctgtctctccatgtccctctgtctgccatgggctctgtcggcccagccgtgccttttaaatctctggtctctgagagtaccctcggcgttggcctcactggctttgtgtgctgggaatggggtgagggtcttgccctggcgccctgggacgcccgccccgccccgctccccacctcgctctcctccctggtgctgtgttctgagtctctgggcttcctccgtctgcatcttctctgcatcctgtctgtatctctgtctctgctgcctctccggcccctgtgttttgttcttggctctctgctccctctccaacttcccctcctctttttgtgtcccttctccacctcctccaccgtctgtgttccccctctactgaccccacctacccctttcaatccaccacccatgacattcccttccccgcacttccccagggagagaattgcagggagcaggcagggaacgggaggcaaaggtggcgagaaggagagagtgaggaggtaccttgggaggcactgaagcctggagcctcatccctctctcctttggccatgtgtgcctggaagtcctccctagtgtctgatttcaatcctcagggggacggcagaacgtggaggagatgccaggtaccaacccttcccgattccctgggagaggccgaggagggagctgggggcatcagaccaggagagagggcaacctgggcacagtcagtgctgtgctggtggccacccattgccttactggaagagggaggtagtgagacccccgttctgggaagtaatcatagcagaggctgtctctgacccactcataccacctaggacccaacagcatctctcacgctggcacctgcgacccttccctgaatgctttccagaccagggtaggaggcgctagaagtcagcacccctaaagaggtcctgggccaccatcagacaggagttagtggatacataacccaaagtcttcaggtggggaactccagagttccctgagaggtccccagcaggatggagacctcattgtccacagggtgacctgctcattcaacactgcctttattatttatttatttatttatttgagatggagtctcggtctgtcacccaggctggagtgcagtggtgtgatctcggctcactgcagactctgcctcctgggttcaagtgatcctcctgcctcagcctcccgagtagctgggattatagccacctgccaccgtgcccggctaatttttgtatttttagtagagatggggtttcaccatgttggccaggctggtcttgaactcctgacctcaggtgatccgcccaccttggcctcccaaagtgctgggattacaggcgtgagccaccgcgcccagccttcaacaccacctttaatggttttctttcccatctccctccagtgcctcctgggatcacctcacaaataaactatttccctcccatccttgctgtgggctggcttctgttggtgctcagcctaagacggtggccagcgggggcatgatggatgggcagagaggaaacaaagggaaaagagggacctctcgtggtggtgaatcatatgtgtctacgtggctaggctgtgctgccctcatgttcaggcatcagcctagatgttgctgtgaaggggtgtgtgtgtgtttgagacagggtcttgctctgttgcccgggttggagtgcagtggtgcaatcttggctcactgcaacctctgcctcccgggttcaagcgattctcccacctcagcctcctgaatagctgggactacaggtgtgagctaccacgcccagccattgtaaaggtattttaaaaatgagattaatagccgggcgcggtggctcactttgggaggccgaggtgggtggatcacaaggtcaggagatcgagaccattctggctaatgcggtgaagccccgtctgtactaaaaatacaaaaaattagccgggcgtggtggccggcgcctgtagtcccagctactcatagtcccagccactcgggaggctgagccaggagaatggcgtgaacctgggaggcggagcttgcagtgagctgagatcgcaccactgcactgcagcctgggcgacagagccagactccatctcaaaaataaaaaaaatgagattaacatttaatatcgattgactttgagtgaagcagattgtatgggtgggccttatccaatcagttgaaggccttaagactgaggtccctccaggaagaaggagttctgcctccagatgacttttaggttttgcttgggttttgttcatttgtttgttttttgagacagggtctcactctgtcacctaggctgcagtgcagtggcatgatcatgactcactgcagcctcaaccttgtgggctcaagtgatcctcccaccccagcctctggagcagctaggactacaggtgtgcaccacgatgcctagataatttttatttttagtagagatggggtctcactgtgttgcccaggctggtgtcgaacttctgggctcaaacaatcctcccaccttggcctcccaaagtgctgggataacagacatgagccaccacacccggcctgggaggctaatatatattcatttaatccccacgacaaccctgtgacataggtactgttagcatcatcatcacgcattttccagatgagggaactgaggcacagagaaagtcagccgctacactatgctgcctcccaggacaatgttaatcactcccaagctgaccccatagagctctttgcatccaggtgagaatcatgaccttcggggtgaggtgacgggacaggtgtgaaagtcctcatgttttccaagcctcaagctctcaatgtgtctctctttgcagctgagaccttactcatcttcctgcaccaagactctacaccccctttgtttgcatttgttaagatgaaggtgtcccagacctggcacgatggttcacgcctgtaatcctttgggattacagtagttcactttgggaggctgaggtgggtggatgacctgaggtaaggagttcaaaggagtttgagaacagcctgggcaacatggtaaaacctgtctctactaaaaatacaacaattggccaggtgtggtggcgggcgcctgtaatcccagctacttgggaggctgaggcaggaaaatcgtttgaacccgggaggtggaggttgcagtgagccgagatcgcgccattgcactccagcctaggcaaaaggagtgaaactccatctaaaaaaaaaaaaatttgaaggtgtcccttgtcccattctacatcgtggaactcatcctgtcccatctttgcccttctacctgtgaaactttgggcacattgcttcacctctctgagccttagtttcctcttccgtggaatggggtgatgtatagaactggcaataggtttaagcagatcatgcttgggggggtccccatcactgccagctgctgttagcacaggcctcccttgctttcctgtgcccctgtagtcaatgccctctactgctcctccagcaacctcccctcctcacatcaggactctccagagagtgatctacatgccctgactcaatttccccacctcccactgcagatcagtgcaccgtctgcccctacaccttccacaaacctgttctcatcaaggcctaaagccaaaggtcgatttttttttttttttggtagtggggagacagggtttttctctgtcactcaggctggagtgcagtggtgcagtcctagctcacggcagcctcgacctcctgggctcaagcaatcctcctgcttcagcctcctgagtatctgggactacaggcacatgccaccacgcttggctaacttttaaagtttgtggagacacgaggactcgctatgttgtccaggctggtcttgaattcctaggctcaagcgacccttctgctttggcttcccaaagtgctgggattacaggcgtgagccaccatgccgtgggcctattgtcttaccttggacttcaggttgggtgcggccggtgggaggaagtggcaggagactagcaggtgggagcagaatgaggtcgaggtgcttactctcccggcgccccgctatccccagtgcaggttggtgatgcctgtactcttctactctacagactcaggtccccaggtctctgcagcctcgggtgcctctgctcaccccttctagcccaggtatggcaactgctccctctgctgctagccctggggtactacaccttccctcgttttccccaaccctgcccactcctcagtagccctttcacccaactctccctggctactccgtttgaatgaacacaccacctctctcctgccaagatgcactccctgaactccctcacgcagccccatccattctctctctcaaccactcccttctcaccatcgccctcccaccctcctactcccctctcccctcgtctgctgcctctgtccctgctccagccttgtccctggtctcccagcccccagtagccaggaggaacgtctcataaaataaatcaggtgatatcaaccgcctgcctccttcccccacttaaatcccttgcaaagctcccctttactcttaggatatattccaagctccctagagtggctgataaagtctcttatgatttgtcctcaagttcactccccacgcaccccatacctcgttcatgataaccatttccagggctctgaaaaagccattatctcccaactctgcacacctttacacaggctgtgtcctttggcacaacacacacacacacacccctcctcctgtaggatctgagaaaattacttgctttatttaggaaaccccatcaaccccagctctttggctcaggcaaatgaacgtctctcttttgtgttcccaggatgcccataaagagaaacagtttgtggctcatgcatgggggcgtggctagtggaagcccctgactgaagcaggaaggcgtggctgaagcacgactgataagtgggggtgtgattagtggaagagctaggctgatgaatgggggcgtggttagtggaaacccgtaattgacggatgcgggcgtagcaagtggaggagcttggctgatgaatgggggcgtggttagtggaaacccacgactgacgaatgggggcatggagagtggaggtgcgtggcttgtggaagcccatgactgatggatgggggtgtggctagtggaagagctaggctgacggatgggggcgtggctagtggaagctcattactgatgggggcgtggcgagtggaagagcttggcggctggaccccggcgctgctgctatatgtgggtgtgtcccgcagacgaccgcgggccgcaaaaacccagattacttggtttaacagttgcccaaatctcagtcagagaccttattagccccctcctcctgaatcccagcttcccacgggactgtttttcaggcagaatttcaaagttttatggcaacttttacagaaatcacagaaaagagacagcgactgatgatgagctgggggagagaagggtagtgggtaacgggtctgggatgttggggctgagcacaacaggacgatagaatgctgaaaacctgtgggaagcagaaagttatgggggtagttgggtcatcctaggggcccaaggagtgggtggcactgcccaaatgtgtcctttgggcaggaaacatcaacagtaagaaaatgcagatggcctaccgacagatggaaggcctccaaagttaaaaatgcccacccagatcccttggcccagtcccatccccccacccatccccaccccccatcaggcagagatgtggcagcatttgctggcttgtagcattggtcctctgggaccctcggtctcctcttcgagggtcctgcccggattggctggcactgagggcaaaaggaaccttccagattgtcaggggagatcaactggactcgctttgattcccggcctcctccccaaagctggttctcatggctgagggagtctgctgccctctcaaaagttgtctgtcacccccttttcccaagacatgcaccctcccgcgtcccccctcccccaaacacactatatacacacacaagcccctccctccaaggcgtggctgggctctcagaggtagtggagggcgagtgggggagctggaatgtctgaagttgcaggttcaaaatgtgcttcctccggctaagccctgggactgaaaccccaaacttctcccctcgtctccgagcctggagaatgagtgtcctcccaagaacccgagtggagggattggaaggaacggtgtgcggcctccttgcgcgcacacccacccgctcctccccgccggggctgagcggagctccctgagggctggggggaagggctgggagctgagacggcctctgacagcctccttcgagggtcccccagggagggtgggttctgaggctctgggacatggggtgaagtggggggggggtcactaggggaagggagactttgggggcaaagccaggctgggtgaccaaggagagagaccttaaactccccaggatggttactgggggtggttccctggggaggggactggggtggaaatttccccagggatatagacggtcaccaacaggatgggctggagttggggtcaccgcaggggaggaaccggggaggctcccgagaggaagagggaaggctgagctactggggacacagaacagggcaatcaaagccaggggagggggcggagaagggaggccgagtcccaggagaggaggccgagtctggggggaaaaggagaccagggtccaagagcaggtgcagccgagtccctagccccgggcgggcggtggggacgagtctctgcgcgaggccctagaagccccggatgtggcagtacgcctccaggctggcgaagaggatgtacaggagccagaggcccaggaagagcgcggtggtggcgagcttgggtccgcgcgggccgcccagctcgccgccgatgtgcggccggcgccggtacagcagcacggcaatgcccacgaaggcgaagacggtgaagagcgtgacggagaaggccagcgtgccagtgcgcacctcgaaggggcggccctgcaccgcccagtacacggcggccacagaccaggcgacgcccaggccaaggaacacgttcaccgcgttggagccggtcacgttgccgatggacgcgtcggcgcactggtcctgcagcgccgccaccttgctggcgaacgtgtctgcgaggcagagacatacaggtcggaggggctttgcgccgccacccacaggggcgggcatccgcctgccccctcccagcctttcccggtcgcctgctttctgcgggcagtgtgggctcaagacccctgacccccacccaagaggcaaagtccatcaccacctttaggcctgctcgccactggaaccgctgccggctttctatgggacctgccgcctgctttctgtgggattcattctcttctatgggactcactgcgtgatttctttttttttcctccgagacggagttttgctctgtcacccaggctggagtgcagtggcgtgatctcagctcactgcaacttccgcctcccaggttcaagcgattctcttgccggagcctctgagtagctgggattacaggcgcccaccacgccctgctaagattttgtgtttttagtagagacggggtttcaccatgttggccaggctggtctcgaactcctgatctgaggtgatccactcgcctcggtctcccaaagtgctgggattacaggtatgagccaccgcgcctagctgtattttttgtttgttttgttttgagacagggtcttgctctgttgcccaggctggagtacagtggtgcgatcatggctcactgcagcctcattttccccagctcaggtgatcctcccacctcagcctcccgagcagctgggatcacaggcatgcgccaccacgtccagctaatttttgtatattttgtagatacggggtttcaccatgttgcccaggctggtctcaaactcctgggcccaagcaatcctacccctgccttggccccccgcctttgcctcccaaagtgctggcgtgagccaccacaccccacctgccccctcatcttagttaaaactctgaggtttggccaggcgtggtggctcacgcctgtaatcccagcactttgggaggcagaggtgggcggatcacgaggtcaggagttcgagaccagcctggccaatatggtgaaaccccgtctctactaaaaacgtaaaaattagctggatgtggtggcgcacgcctgtagtctcagctgctcaggaggctgagacagaagaatcgcttgaacctgggaggcagaggttgcagtgagccgagatcacaagatcactgcactccagcctgggtgacagagcgagactctgtccccacaccaaaaaaaaaaaaaaaaaaaaaaacaaaacccaaaaaaaccaactttgaggttcactggcctggtttctgtcatgtcccccaacatagttccatggactcttctgtctggtttcttgcgggatgggacatcaacagcttgtttctatggaacccactgattggcttctctgacaatccccaccgtcttcctaggaacccctctccccacagctgtctcttccccaccctgccaccttctctctatgaaatccattgtctggtttctagcatttcctgctaccttagttttatgggaccttctacctgggtgcttttggggaggattcaattcacatcttgcacctaggggacccgctgcctggcttctattatgccccacctccgtatttctctgagacccaccacatgggcgctgtgtgactccacccacctcattttggcaggatcctgtgttgcccctgcctggctcatctgagatcctaccccaccaaagtctcccagggtgttaccagggatggaggtgcccagggcaacgaagacaacagcattgacagagtccttgaggccaacggtgcagccgaagtgggaggcgaggtccccaatgagggcggtgagcaggccgatgaccaggatggagacaccaaagcaggcccagccgtggcagtactcggtggggggcacacaggcgaagagcaccttccagaacaccgtcaggaagtgcatcacgtagtcaaagcacgacggcagccgctcctcccgggacccgtcctcctcctcctcctcgtcccctgtgggcacacgacccagctggggcatacactcagacttccttccttgcctacagaggccccattttgtctaacttcctgacagcaagtcccattgaatgaacttctttcccagaatcccttgcacctacctgtggccaagtcaactgctaaaaacagttactttcccagaatcccttgaagctaggagcttgattgggcccaggtgaaaaatatttactttcccagaatcctttggatctaaatatggctaagtcagcagtaaaaacagttacttccatagaatcccttggagctaggggcatgactgagtccaggtaaaaaaattttactttcccagaatcccttgcacctaagtgtggccatgtcagcagctaaaaacagttactttccctgcatcctttgaagctaggagtgtgaatgggcccaggtgacaaatatttattttcccagaatcccttgcacctaaatgtggccaagtcagcagctaaaacccattactttcccagaatcccttgaagctaggagcatgaatggacccaggtgaaaaatatttagtttcccggaactgcttgcacctaaatgtggccaagtcaatgctaaaaacagttactttcccagaatcccttgaagctagaggaagccacatctgcccagctaaaaacatccagttccccaagaccgtttgctgccagggacagccatacccctagctaaaattattcattttcccagaagccttcacagctgctgaaagccagtccacagctagaagtattcacttcctcagattcactgcagctaaccagagccacagtctccactaaatgtactcactttcccagaatcccttgcagctagagggctatatacccagccaaaattaatcactttcctagaatcccttgagactagcaacagctatggcctcagataaaaatatggtattcactttcccagaatcccttgcagttggcagttgccatgtccctggctaaatacttgttttgccagaattcctcctgtgagtgactatctgacccagtctgccaatgagatataaacagagggtttctggaaagccctggctttcctgatgtgggcattgggttacagatgtgttttctgagctttgtaaatgatgcctcatgcttagagctgtatcacctattgtgacctaatttgaccagcttttgacctgcagtgacttttttttttttttgagacagagcctccctccgttaccaaggcagtagtgtgatctcagcttactgtaacctccgcctcctgagttcgagtgattctcatgcctcagtctactgagtagctggaatcacaggtgtgcaccaccccacctggctgatttttttgtatttttactagagatgggatttcgccatgttggccaggctggtcttaaactcctggcctcaactgatctgccctcctaggcctcccaaagttttgggattacaggtgtcggccaccgtgcccagccgacctgcagtggcttttataacctgaaagccctaaggcagtgttttgtttacctcaccctaagctgattagtataaagcaatgaatgagaatcaatgagcacacttgtgtgtggcacgcattacatctggaaggatgctcatgagaacgaacgtagctcctgaccagtcactgctgaacgcatccctaactgatgtaagacatggctgaggtcagagcagggaggccacgctctttgggagagaggtggctgctattaccgcatcactatgtcagttgaggcttctgcctgccctgcttcaaatccttccttggttcttgtactaccttcaaacccaggcccacatgcctaggcttggcattctgcggactctggcctcagctgacttccccagctgctcccctctacagggaggctcgtggttatgcctgtcactctgaagtcacctctctggtgtccaaccctggatccactgtgtgatcctgaatcagtgtcctcacctctctgggcttctgggtgcctatctgtgataaataattggacctgcttcatgggaaacttgtgatgacagaatgagttggttcatgtaaagtgctgtcaacggtctcggacacctccagcgttattactgttgtttcgattgttatgattgaaggccttttttggtgcctgggggaaattcaaagatgctccatgccaagtccagcccacaaggagcttacagtaggaagggaggtaaaggaagtacaaaagctctgcgacaagatgggacccgactcatctcctaagggagtgaggactacccttctccctcacccctccagcagctctgtgctcgcacagcaaagaaccaaaaggcacgtgctgaacaaagtgcaaagtgaccaagctctgatccagacactgaggatacattaattaaaatgagttcacacaggaaataaatttccaaccatgcctggcactcaagacacgatagggtcagctgggcacagtagcttacacctgtaatcccagcactttgggaggcggatgtgggcagatcacttgaggtcaggagttcaagaccagtccggccaacatggtgaaatcccatctctactaaaaatacaaaacttagccagacatggtggtgggtgcctgtaatcccagctactcaggaggctgagtcaggaggatcgcttgaacccaggaggaggaggctgaggaggctgcagtgagccgagatcacaccactacactccagcctggatgacagagactacatatctcaaaaaaaaaagacatgatagggtcaccgttgtcataatcaggattattattacagttattattattgttatgttgttattcttcctccaccccgatctaatcacctgatctaaccacctggtttctataaacccacagcacgatgtacgctgggtctctacgaccgccacctcccacctcgtttcagttccgcctcatcctccgtctccactaagtccccagaggaaggaaatgctccgaagctcaaagagccccttgccatctccccgttgttcgtggaatgaacctcaaaggagcctctgcagggcccgtctcctgctagtttcttttcttcgtttttttttttttttttagacggagtttcgctttgttgcccaggctggagtgcaatggtgctatctcggctcaccgcaacctctgcctcccaggttcaagcgattctcctgcctcagcctcctgagtacctaggattacaggcgcaggccaccatgcccggctaattttgtatttttagtagagacggggtttctccatgttggtcaggctggtctcgaactcctgacctcaggtgatccacctgcctcggcctcccaaagtgctaggattacaggcgtgagccaccgcacccagcctctactgctagtttctacagcctctacccacaccctctccactttcctcccacaagctctctctagccccaggggcttcccccattcaaaaccctccatggctccccagtgtgttcaaatgccacccaagctccctactgtggtccacaaggagcagtgtagaaatgtgccgatttccagcctcatcctggtacctcttcctcccgcccaacaccaggcacccacccaaaaaatgtgccataatctcgcacactccagggcttctgtgcttggctctccctctgcctgaaacactctccctgtcttctccctcctcctggctgacatctttacccatttgaagactcagctgggaagccaccccctccaggaagccctccctgactttcaggctgggttaggaaccgcatcagggctttcctccgggtctcccatcccagccctgcctactctgggttgtctgtgtcttgtgacatgtctgtctcctgcactgggctgtaagctccatgacagggccagaaatcacttctgtgtccctggcaatgtctcacatagggtcgggcccagaagatccctcagaagtatgtcagaagaatgtggcttcagagggagatgccactttgtttctactgggcaaacagtctggtgtttctaggactgctgccttgtattttcccatccccttaagcctggtttctttggatcctgctcgcccagtttctttgcaaccacaattccatgtacgccttcagtccccaagagctggggccttaaccctgatgttatgtaagagattgaagccctgagctccgacctcgggccttttctggactccctgtgggacttcaggccactccctcctctgtctctgagcctcagtctccccagtccatatcacaaagggccagtgttggcttccaagaccgtcagtgggtacaagtgtcgtagtgtctctagccacaagggggcagtgtgggcctgtctgaggccaaggagggtggtgacccgcgcaggtaggaaagagctcggtgccctggtgactgtctccagggcaacggaggaacccaggctctctctggggtggccacaccatttaatctgttcccaccctcctgatgcctgatgctgggagaaagcccaggctgggaaccctcccggttcagcccagagccaaacacaaaccctcccagccgctccagccaccacctctcccttctctgccctttctgtatcctcatctacctgcctctccctctccccggcccatttcagtttgcaccgttcattctgtctcatgtcttctccatgtctctctgattctccctgtgtatttctgtgtgtctctctctcctgcttgtattttttttagagacagcgtcttgctctgttgcccaggctggagtgcagaggcacgatcatggctcattgcagcctcaaactcctggcctcaagcaatcctcccgcctcaccctcccaaagcgccaggattccaggcatgagccaccgcgcccggcctgtttatctttgtgcctgtctctccattcatttctccccctttccctgtgtctctgtctctccatctttctctcttctctctcctccctccccacttacctgcgctcaccgtaattgcctctaaaaactgctccctccatgaatgggtcccaattaccaaggccaagttcgttttcttgatgagtttatccaccgtgttctggggatgagagggtgggggagaggtcactgcccctgagcgaaccagggaagctccatgttgggtcctgggtcgggggctcacagcctgtgcccaggggtcctcaactttccacacccccgttctgaaggcaagcaaggaaaagggaggcatgtgctgtccgtggtcctgacgtgggacccttctttggcttgatcttaggaaccttgtggctccccgctttccggaccctccccaaggaaatgaaccaggctggactccaggaaggtgaggccccggaaaatcaccttaaaatcatatgactcctcgatgatgacctccagccggcagttctccccaagaactggcttgcccatctctgctatcctccgagcctcctcctcctcggctgttagcttcctgtccccatcccctgcagcatgaggggtgggggttagactcctgggagacctacctaattgggcctgtgacgcctttactacctgtccccatagttagagaaagcctatctgttctcctctgggaagctccttggtgactcctcccagcctcccacctgaccaccgtctccttcaaccctgaggtccagctcccaagggttggttcatgatctttagttggtgggctctggggttcgtatggtggaggctgtgagactttaggcaatacctgagcctctctgtgccttagttttcataactgttaaacgggcacaataattagtacctacctcatggggtggttgtgagacttaaatgagttaattcgtgtgaagtgcttagaacagtgcctggcacacaataaatattcaatacatgttactatctttattattatcaccaacattatcatcatcgttgccaccctgataggggaggcctggtctctacatccagtttctggaaacatcctagagtgtggctgacatggtaaggaaaggggaggacatccgattttggcacaaatcttggaaccagacccacctacatcctggtcctgagctcgcttctctccccaaagtatgctgacccctgactccaagcccagcagcagcccaaccctaattctggtccctaactctgagctggactctcactgtggccccaaatggaagcctgtcatcaacactgactccaaaccccaaccctcagccctggatctgacctcagcacaaccctagccctaaaccctaatcccgactctaacattcaccataacctggagcatcaataaccccaagccaaatcccacactctatctccagatctaactccagtcctacacctgacctcaaacctcagtcccaactcccaactctgacaccatcactcatgaggagcttgaccacacggcagaagctgaagtgtgttcacctgaacctgtttcctctccttcctgggcaaagagctgaactacatttcccagcctcccttgcagctgggcgtggccacggcctgagttatggacactagaatgtgggcagaagtgatggtcagtccctccaggcttagcccccgaaaacctcccatgtgagcctcgaaactctcttgccctgttcaccagcagcaaacccagccacaatgccaaagctccctggcacagtggagtcacaagatggaatggccacatggcagaagaaagccacccaccaactaggaacactctcgtaaaactttgcctgagaggccaggtacagtggctcatgtctgtaatcccagcactttaggaggccaaggcaggtggatcacctgaggtcaggagttcgagaccagcctggccaacatggtgaaaccccatctctactaaaaaatacaaaaaaaattagctaggtgtggtggcaggtgcctgtaatcccagctactcgggaggctgaggcaggagaatctcttgaaccccggggggtggaggttgccatgagccgagatcgcaccattgcactctagcttgggcaacgagagcaaaactccgtctcacaaagacaaacaaagaaacaaaaaacaactttgcctgagcaagaaataactttttttctctcttctccctccttccttcctttcttccttccttccttccttccttcctcccctccctccctctctctctctctttcttacttttctgagatggagtctcgctctgtcacccaggctggagtgcagtggcacgatctcggctcactgcaacctccactttccaggatcaagtgattctcctgccttaggctcctgagtaggtgggatcacaggtgcccaccaccatgcccggctaatttttgtatttttagtagagacagggtttcaccatgttggttaggctggtcttgaactcctgaccttaagtgatccgcccgcctgggcctctcaaagtgctgggattacagacatgaggcattgtgcccagtaaagaaataacttttattgtgttaagcccctgtgacttgtcggtcagtttgttatagcagcttgtattgcttcctccaacgaatacaatctttaatctaactctaatcctaaccacggatcccaattctgatcttgactccaaaatgactttgtccatctccaagccactgaccttagccctaactcttactccaatctctgaccttggccccaattctaacctaaattcctcaaactctattactcacctcaaagtccaactttagctttgacctaaatctgactctaattctaatctgatcccaccagcaggaaagcacctccactgtgactctcaccttaacatggtcctaaccccgatctccaatccaaaccccacctcactcctaatcaaccccaaactggattctctctgacctcactctcacaaacccagatctgattgtatgacttacaaccctgattacagacataatcttttgagatggagtcttgctctgttgcccaggctggagtgcagtggcaccatcttggctcattgcaacctctgcctcccgggttcaagcgattctcctgcctcagcctcccaagcagctgggattccagatgcctgtcatcacactcagctaatttttttttttatttgaggcagagtttcgttcttgttccccagcgtggagtgcaatggcgcgatctcggctcaccgcaacctccacctcccgggttcgagcgattctcctgcctcagcctcctgagtagctggaattacagttgtgtgccatcaggcccggctaattttgtatttttaatagagacggagtttcaccatgttggtcaggctgctctctaactcctgacctccggtgatccactctcctcggcctcccaaagtgctgggattataggtgtgagccaccgcacctggcctcacccaggtaatttttgtatctttacaagagatggggtttcaccatgttacagacataatcttgacctccaaaatgctaactgtaatcccaaactcatacaggcaccaccaactctcaggccagaccccactgtcccccagccctgaatctgcctttatctcacctccaatctgcctcaaacccaacctggaagagtagctttggggctgggaccctcccccaggccctcttccagtggctcctccccactcagagcccagaggtgacttcactcaccttgattgagtagcagagctggggagagacagagacaggcagacagtgagatcagttccccacgaagctcaggtccacgagctttaaggagtgcctgcaattgagcccctgaaagtcccccgaccctggaccccttacttctcccacagcccactggtcacccctcacctgaaatccctcgcttaagccactggggctggcccagctcaatgaagaaattatcctttttctcatattcctcgtcatcaactatcttcacctgaagagttttcctgtgcagggggtaagggggaggcagaacactcagtgtaaggccccctccccagactcaccaggcaaccctcctggcagccacccagttttccaagcacctcctctgtcccagactccacaatctcatttacttctcaccaccacgcagggaggaaggctctattatcatccccatttgacagaaacaaaaccaggcactggtgaggaagctgagtctgattaaagtaaagcattctgggtgcggtggctcatgcctcttatcccagaactttaggaggctgaggagggagggttgcttgaggccaggagttcaagaccagcctgggcaatatattgagagcccatctctatttatattaaataatttattttaaaaaataggccgggcacggtggctcacgcctgtaatcccagcactttgggaggccgaggcgggcggatcacgaggtcaagagattgagaccatcctgtccaacatggtgaaactctgtctctactaaaaatacaaaaattagctgggtgtggtggcacatgcctgtagtcccagctacctgggaggctgaggcaggagaattgcttgaacctgggaggtggaggttgcagtgagctgagatcatgccactgcactccagcctggcaacagagcgagacaccatctcaaaaaataataataataaaaaaataaagcaaagcggtatgagctcatggttgagacaggatttgaacttacaactgtcagaatccagactgttaacccctgcactccagcccagccactatggtctcctacctagattactagttgcctgctaaacaatcccatgcttcagcctcaccgcccacagtctgttccttcaagagcagccagagtgatcctgatagaaccaaagtcagaccgcattcctcccctgtgcaaaacatttgcaaggctcctatctctcacagaatgaaagtcaaagtccttaggatggcccacaagaccccctgcaatctagcactcattccctttctggcctccttgctattccttgaacaagccaggcctgctcatgcctcagggcttttgcactggctgttccctctgcctagaacactcttcccccaggctcccttcctcagttcttcattcaaacttcaccttctcaatggggcccacttcttccatcttatttaatagtgaaatccctcactgctccccctccagcactcccttatactgctctgttgtctttctttttaatgtatttattattatttttggagacaagatcttgctgtgtcacccaggttggagtgcagtggtgcaatcatagctcaatgcagcctcaaagtcctgggatcaagcgatcctcctgcctcagcctctcatgtagctgggactacaggtatacactaccatgctcagttaattttttattttttgtagagatggggtctcaccacattgcccaggctggtcttgaactcctgccctcaagtgatcctcccatcttggcctcccaaagtgctgggattacagatgtgagccatggcacctggcctgtcttctttaaatatcaccttctaacaccctctaacatttatttagtttattgttcgtcatttaccatttgcttccccatctttaaatttaagttcccccaggtaagttcatttatgttttttgttttatctccaacacccagaacagtccctggcatagagcacaccctccatgcatattttgctaactccaatccttcagcacagaaaaccctcagcttcctgctctctgtcccaaccagatctggagagttaaccaagtgctgatgctaactgattttctcagcatctctgctcctatggtaaccagggggtggcaggaaacagccagaagttacctgtcaccttcaggcacataatccacacccctcgaccccaaagacccacaaacccagaatgcccacagctttgccactggcaactctttaggctgtaggaaccatgtagtcccacaaggcctggccccagaacccaaaaacacaaacacccagcccacacagtcacccaatcgaggaagcacagccgatcacaccgcccacacccacacgccatcacaccctacagccattcccactgcagtggcaagactgcatggaccagatgcccgtcagttagcacgactcccccaccacagccttggcgacatcgccaccctgcagcccctcactgtggtaccacgtagacgctcctaccttatatctaactcctgacgcctcttggtgtctctgtttacttccttcagtgcctctctgcatctctgtccctacattttccatcttcttttctctctctgcctctctcagcttctctgggtctatctctccatctctgactctgtctctctgactctccagcagtctctctctctgactctgactctctccgttctctgtctcagtctcttctcatctctctgctctccctttttttgaaacaaagtctcgctctgttgcccaggctggagtgcagtggcataatcatggctcactgcagccttgatctccagggctcaagcaatcctcccacctcagcctcctaagtagctggaaatataagcgtgtgccaccacacctggctacttttaaattttttatagagacaggatctcactatgttgcccaggctggtcttgaattcctggcctcaagtgatcctcccaccttggcctccccagtgctggggttacaggtgtgagccacagcacctggcccgcccttctttatctggattcttctctccctgtctctgtctttcagagtctaaagaatggagtaacaaaagtcaacacacttcaagcagaagagtttcaatcaggcagtcattcaaaagacgcatctcaacacacaaacacgcacaagacacagcgacacccgcgcaaggacaggcgcacacaagacggccatgtggggacatccgcccacctccaccctcctggtttcaggatattttcaattttctgtgggtggaaagaaagggccgcccccgacctcggcgtgggctgtgagctgtccgcggtgctgaaatgctggggccggcgaggagggagggtctcccgagacatgctcctcacacaccctgacacacacagacagctgccgacacagtgacatgctgacagggtgacacacacacctctgtcgctcactctcgcagacatgctgcgatccgctgacacacagtgactgacgtgcagtgacaggcacgtcaactgcgcctggcaggcgcaccctcaggggacccaaatgcaggagaaacccaacgcgcaggaaacagcaagagggactcgagctagaccaagacaggacttcctgagatcaaaggaagcagatttcctccccagcctgcccccttgtttcctgaaaactccactctcctgcccttctcccctgccagtctctgatctcagacccagtctcctcatcctgtctctcactgacccaaactcccttttctctctgcagcatcgtgagaacctctccttccctgggtcagtctctctcctccatgaatgtctttatcgcgtctccatctctctgcctttcagtctccctccatctcagctttcaatatccacctctctccctccctcaaagcatctctgtctctgtgtctcttcctttttttcgggggtggggtgggtgggagatggagtttcgctcttgttgcccaggccagagtgcaatggcgtgacctcggctcacagcaaccttcgcctgctgggttcaagcgattctcctgtctcagcctcccgagtagctgggattacaggtgcatgccaccaggcctggctaatttttgtatttttagtagagacggggtttcatcatattggtcaggctggtctcgaactcctgacctcagatgatccacccgtgttggcctcccaaagtgctgagattacaggcatgagccaccgtgcccgacctctaagttcctgtctttctgtgtctctgtctctctgttctgtctctgtttctctctccagttctgttattctgtcttcagctctccctgtgtctatctctgtgtctctgtctctgtctctcatgctctccctgccaccccatctctgggtgtctctcctccatctccagcccagctgcttcaaagcgcctctaattagtgcctgcccatcagaggaaggaagagtttccctaaacactaattagcctcctgttctctgtcttctgaagccacagctgggagcttgtgggggtgggggacagagggtgtcccagcctggggaagccatgtgggggaggacagggccgtaaggttgcagcagcaggagggaagcaggttggactataagaaggaccggaaaaagcagaaagaaaactctccattcccccatctcttggtgtgagagaggggtctgggatggtgcctctcgcagcccccaacccaagttctcaacaaccctcagacagagaccaagccagacagagagagagaaggaaaggtgtggagtgtgcctgaaatataagctgagtcagagagcgaggtgctggggacagacagctgcagatgaacagagacgcagagacccagagagagacagcccagggagtgagagatgcagagatgcagagggagagacggagagacagcgagagcagtgagaagctgagtgctgcccgaggcggaagcgcagaggctgggaggaggagggagggggagcgcggtggggactccgcttgagtaggaggcgcgtgggcggcacggaggagggagacagacgggcatgcgggggcggaagagagcgggcagaggaggggcaggcgctgcctgcatcctgggcaggggggtgggggaatgtgaggcttcaggcacacattgggggacactcggtcacctgtgtaaggggtggccagggatctgggcgtgagaacagccctgacttaataatttagtgtacgtgtccgtgattttatgtgtgtctgcgtgttttttttctttttttgagacagggtctcactgtgtcgcccaggctggagtgcagtgggtgatcacagctcactacagcacctaactcgtgggctcaagccatcttcctgctttggcttcccaagtagctgggactacaagtgcacaccaccatgcccagctaattttaaacaatttttagcagagtagaggctgatctccaactccaaggctcatgccatcctcccgcctcagtttcctaaagtgctggcactacagacatgcgccaccactaattagaaaaattatttttagagtaggagtcttgctatgttgcccaggttgctctcaaactcctggcctcaaatgatcctcctgcttcgtcctcccaaagcgctgggattacaggtgttgaccaccacgcctggccctgccgtgtgtgtctatgtgtgtgtggtgcgtataaatggctttgtgtccaatctgtaaacgtctgtctacatgtgtgtgtctgagtgtatccagccagcccacctccccagaccccattttcctaaatcccagccctcaggctccccagtgtctccccaggccctgccctgccttcccaggcccccagattccagcaccatcttttcccaaatcctcgcccagattcgcgttaggtgccccgctatttccccaggttcttcctcatacccagaagccccaccccttccctagctccgcgcgcccaggccccacccatcttgttaggccccgccttcttccgcagcccacatccattttcccatttcctgatgtcgtatgtccaaacccagaccccacctatcgccctggacccgccccctctccacagccaccgacagcgtctcatctccacaagcctctccccacatctccctgggtactcttcagcacacactccacgagctaccaattaaggccccacaccgctctccccaggccccgtcccatctctcctcacctcgtccccccttcctccttggggccctcttctcacctgtccggccacccttctaggcctcgcctcttcatttcacagtcacaaccccaccaggccccgcccacgtggtagacacagcacacctaggccccgcccctcccgaggccaagcccactttggagaacgattcactcaggcccctctcctcctgagggcccagctgttcagtgaagccccgcccacgtcgtgggcatgggtcacaggccccgcccacgttgcgggcacggccacgcaggcccctcccctcccgaggcccaaccaagacccgcccactatgtgggcatggctcacccaggccccgcccctgagccacatcaggcctcgcccattccgaagccccgcccctctccgggccgcctcgggcgtgctcacatggtctcgtcgtcgccaaactccagctctccgcacgcgtcctcgtagtgcacgccgccgccgcgcgccgtgccgtccaccgtgcggtagggaaggcgcacggtgccgcgcgcgcccgagctgcgcacgacgcgcacgtccacggtgcccatgcactcgctcacgtgcagcaggcggtcctggaaggagaagatgcctgcgtggtcgtcgtccaggatggtgacggtggccagcagcggcgccaccagccgccccttgggccgcccgccgccgtccggctcgaacatgccctgcgcgtcgcccacgcgcaggttcagcagccgcacgaagaaatgctcgtcctcctcgaagatgtcgtcgtcgatgatgccgatgcgcagctccttctgcgtctcgcctggtttgaacaccagcgtgccctcgctgcggcggggtggggagggggaagagcggggtgagggtcggtcatcggctgtgtgttgtacggggggagtctggacgtgcttcccagaggagacgtaggtgccatagaagaactcccaagtatgagggtcgacaggcattaaacaagtaatactgagggtgaatcggggtgggcgtcctggaggaagggctgcagagcgggaacaagacagagtgggcccctccccgcgtggaactcgtgaagagcagaaggtgggaattaaacaggtaatgataaggttgagatcagggcaggcttcctggaggaggcattagcaggtgggcatactccaggcagaaggaacagcacatgcaaagtccaagagttgagagggagcctggggtgttctacatccctgcttctcaaaccttaatatgcatatgaatcccctggtggagcttgtgaaaatgcagattctggtttagaagctcccgggtttctagaatcgcatttctaacgagctccaggggatgtcctggtcacattttaagtggcagggatataggacccagaaaggactctgtcattcctctgataaaaacccttcccagatgcccccaagaggaagtccatacaccttaacttggcatcactcattcattcaacaaacactcctaagggcacccgttgtgtgccttgtgccgagtggtgctggggacacagcagtaaccaggccctgtcctcacagggttcacagccccatgggagagccatatcaccatgacaattgcacatttaatgatttaattacggttcattcattcaacagataactgaccgttgtgtgccaggcattgttttaagtgttgggggaacggcaccaataagaagctttgagattctgttttagtgcagaagaatgaacaataaacaaacacaggatgtcaggtggtgatggtgctatggagagaaacaggagggtagggagtgaggagagggagctgttggcatggtcaagaaagccttttggaggaggtaacatttgagcagagacctgaaggaggggagggagtgagccatagggaggatgcctggaaaagagttttttgttgtgttttgttttgtttttttgagacagagtctcgctgtcatccagactggagtgcagtgtctccatcttggctcactgcaacctcccctcccgggttcaagggattctcccacctcagcctcccgagcagctgggactacaggcgcctgccaccatgcctggctaattttgtgtacttttttgtagagacagggtttcatcatgttggccaggccggtctcgaactcctgacctcaaaagatccgcctgtcttggcttcccaaagtgctgggattacaggcgtgagcaaccgtgcctggccaaaaagagtatttttggtaaagggaacaggcaatgtgaatgctctgacctgggactggacagccggacaggggacaggatctgacttagggacgggtcacctcttcgaggaactgcagggagaccagcatgatgacagcagagggagccaggacgagagggtggaagatgacatcacagtgggaacgggggcagatcacctagggcctgggtgggccacggtgaagacttctgcgtttaccctgagtgaggaaggagccctgtgaagcttcgttccgagcagaggagggacacgagctggcttggtgttaaaagagtaacagttgtggaaatctctgaaacacccataagatactctgtaatggggggagccggggagggaacaaggcagtgacattagattactcagagtgaaattctgaggggtcatggagtaagtggactcttcctggcagggctgcagacatcagcgtgactctgggatattaagaaatcttgaaaatctatcatttcccccaatccctcctactgtgcatgtaaggggctcagcaccatctctgaaccctgctatgtgatccatatgcattcactatcactttcatattaaaggggttctggggccgggcgcggtggctcacgcctgtaataccaacactttgggaggctgaagtgaatggatgacttgaggtcaggagttcaagaccagcctggccaacacagtgaaaacccgtttctactaaaaatacaaaaattagtggggtgtagcagcgcatgcctgtagtcccagctactctggaggctgaggcatgagaattgtttgaactggggaggtggaggttgcagtgagccaagatcacgtcactgcactccagtctgggtgacagagcaagactccgtctcaaaaaggtgggggcggggagtcaggctccagttttccagctctgtgggaggaagagagggaccgcaaggttctggcaagaggtagggggcatagaacctggtgaaaagacctgcagtggagggatgagggagtccctcagctcaggattcactgtccgtggtgatggagcacccaggagggtgggctgacctgcttcaagcccagtttggccaccatgccagctgtgtgatcttgggcggtcaggattctgcagtcctctgagccttggtttccttatctgtggaatgggctaataatagtgtttacctcctggcgctgtggtgaggactgaattgatacaggggaagcacccagaggcacagttagctagtgatatccacatattaatatcataatcttagagtcctaaaagtcatgggatatgagacatttacatgtaagggataaagggatcagtaaaatatggagattgtagcactatctttttttttttttttttttttttgagacggagtcaccctgtcgcccaggctggagtgcagtggcacgatctcagctcactgcaacctccgcctcttgggttcaggcgattcttctgcctcagccttccaagtagctgggattacagatgtgtgccaccatgcctggctaattttttgtatctttagtagagatggggtttcaccatgttggccaggctggtctcaaactcctgacctcgtgatctgccagcctcggcctcccaaagtgctgggattacaggcataagccaccgcgcccagaccttttttttgtttttgtttgagacagggtcttgttctgtcatccaagctggagtgcagttgcacaatcccagctcactgcagcctcgacttcctgggcttaagcagccctcctgcctcagcctctcgagcagctgggactacaggctcgtgccaccacatctggctaatttttatacttttggtagacatggggttttgccatgttgcccaggctggtcttgaactcctgggctcaagcaatccgctggccttgggctcccaaagtgctgggattgcaggcatgatccactgcatacatcctgtagcatcatctttgccaaacaattaatccaaagatttagcaacatctttaccaaacaattaaactgggcatcacagtaatggacgagtggacatcatgttcctcctgatacaatgcacccagggggatagagcatcgcttgcatgggattcctgccaaaagtgcaggactccaatcatcaggaagcattagacaaacccagattgagaatcattctagtaactggcctatcatcttcaaaagcatcaggtcacaaaagtcatgggaaggctgagaaactgatccagactgaaggagactaaagagatttgacagggaaatgcaatgtgtggttctggatcaaatgggaagagagggcaggagtgaaaatacagccatcaaggatattacagggatgactggggaaatggaaacacgggctgtgcatcactcaattgacgttgagttaacagtatcaattcagtgttagatttcttgagtgagatcatagtattgtgattaggtaggagaatgccattattctcaaaagatgcatgctcaagtatttaggcatgaaggtcatggtatttgcaactcgtggtcacagagtgtcacaattattgttattattttattattattttgagacagattctggctctgtcatccaggctggagtgcagtggcacaatcttggctcactgcaacctctgcctcctgggctcaagcgattcccctacctctgccttctgagtagcagcgactacaggcacatgttaccatgcccagcttatatatatatatatatggagagagagagagagagagagagagagagagagagagagagagagagagtgtgtgtgtgtgtgtgtgtgtgtgtgtgtgtgtgtgtgtgtgtgtcttggtctgtctcccaggctggaatgcagtggcgcgatcttggctcactgcaacctctgactcctgggttcaagcaattctcctgcctcagcctcccaagtagctgggattggactttagaagccaggcatcagaatcatagaaggctagattcacaggacttatgtttcagcactggacacagaatctgagaagataaaaatcttaaagccatcaagtcagagactggatagggtttggattagaataccaaaatgttggctggtcgtggtagctcatgcctgtaatcccggcactttgggaggccggggtggatgggtcacctgaggtcaggagtttgagaccagcctggccaacatggtgaaaccccatctctactaaaaatacaaaaattaaccaggtgtggcggtgcacacctgtaatcccagctactcaagacgctgaggcatgagaatcacttgaacgcgggaggcagaggttgcagtgagccgagatcgtgccactgcactccagcctggtcaacagagtgagatgcagtctcaaaaaaataaagaatatcaaaatgttagaattctagaatcttagaacttcagacccttagtgtgtcaacatcataggggattaaatctcagaatcttggaaaaactgtgctgtttagggttctcagagatcacgtttagtttggagaaactaaggctcacaggtgtgaacctgtgggaaacttagaaaaagaaaaaggctttccttcttcaagacacttatttccataagtcagaaaactcttataatagaaatgcaaatctacaatgtccactatgaagagagcttcctcagatatggtggttttatgcagtgcacagcttcaacaactgtacatggcagacctgcctgctcagactgaggcaggaacttgcccaaggaacagggtccagggctaagctcggagtggaacccaagtctccttcctcccagtctttggcctaaggtaccttgataaggcaatgccaggcctcgaatgtcttccaggataggaaatcaaggaaggataggaagatgttgactcttcttagccctttggttccagcactgaacagcatttcctccttcacttcaaacatcttggtcctggccaggtgcagtggctcacacctgtaatcccagcattttgggaggctaaggcaggtggattgcttgagcccaggagttaaagaccagcctagacaacatggtgaaaccttgtctctacaaaacataccaaaacaacaacaacaacaacaaaaacaattagccaggcttggtggcatgtgcctgtagtcccagctatattggaggctgaggtgggaggattgcttgagcttgggaggcggaggctgcagtgagccatgattgcgccactgtgctccagcgtgagtgacagagtgagactctgtctcagacaaaacaaaacaaaaccacaccagcctgggcaacatggcaaaaacccatctttacaaaaaatatataaattagctgggcgctgtggtgcacacctgtagtcccagctacctgggaggctgagatgggaggatcacttgagtccaggaggttgaggctgcagtgagctgtgattgtgccactgcactccagtctgggtgatagagcaagaccctgtctcaaaaaacaataaaaaacaatcttggtcctgaggtcatttgtaagtgacaaagtgggctgttatcccaggaggtgacacctgtactcacttccttctgcaaagcctcagggctctagatggggacagtgcggaccaggggtgggtaggagtggaaaggtgaaaagatagttgaaagcaggccccaatatggtgaatgcagttccctcaactgagggcatgtggatgatatggtgcactgggagaggatggaccgagtggccaaagggatcccatgctgcagggtgatggaacaaagacctgtgaacagctgcattttgttttgttttgtttgagacagtgtctcactctgtcactcaggctggagcacagcacaccatgcacctgtagtcccagctactttggaggctgaggtgggaggatcagtttagcccaggaggtggaggctgcagtaagccaggaaggctggggtgggcagggtaggaaaggtggatggagatgggcagacaaaaggatcctggactgactgaggtggagggaaagacctgcaaatgtccaagcgctggaaagagaagtgatgagggcagagagggaagaagactggctacaaaaagcagccaggcacacagtggtggaactcaagatcgatgaaacagagaactgccaggtgcggtggctcacgcctgtagtcccagcactttgggaggccgaggcgggtggatcacctgaggtcaggagttcaagaccagcctggccaacacgatgaaaccccatctctactaaaaatacaaaagattagctgggtgtggtggtgggcacctgtaatcccagctacttggaaggctgaggcaggagaatcatttgaacctggaaggtgaaggttgcagtgagccgagatcgtaccactgtactccagtctgggcaacaagtgcgaaactctgagaaaaagaagaaaggaagagaggagaggagagagtagaggagagagaggagagaggggagagaagaggtgagaggagaggagagaagatgagcgaactgagtcccaggaagagaagggttaaagggatgagggattggctgctgcttgatggcagaaccaaagatctgggaacagttcagcctcagctgtaccccagggagaagattaaagggggatgtgtcaggctactgagcaggtagaacctctgaaaagctcagccattggccctctttctccctgtctcctgatttatttttcttcacagctcctaccactacctggcatttttatgtaatcagtgtttacttcctaactgcctgtctttcccaggagaatgtcagctccatttgggccgggactttatgagttttgttcaccactagtcgccggtgccagatctgtttgtttcttgcacatagtagacacatgataaatgtcattatgggaaaggggagacttgtgcatgaattaacaacacatactgttcaaagcatgatgtaggctggtgaaaatcattgaaaagaacatactgtaaagctataagtcttaaaatagtgtgtcatggacagaagaactacaaatagatgaattttgtgggccacatgaggacagagatcttatctatcttggttattgttctaggttgatcccctaaataaagacatctggcacacagtaggtgctcaggaggaactgttgaatgagagaatatcacagatttgcaaggagaggggtaaggagagggactggggctgtgagatatggtagagggtgatgggtgggttgctttatggcacaaccaaagacctttagccatcgtctctctcctccactcctattttattttcctccatagcacttattgccacttcaagtttttatatgtttagtagtttatatcctcattgcaatttgagggcagggaccttagctgcttgttcccatggtacacccattggcatacagtgcatgctcaataagcatttttactttagtaatggtgggagaaggcttgttctaccaggtagcaatacacataatggagctataataattaaaacagtgtggcaccagcacaaaaccacagaaatataaagaatgcaggaggagtggtgtgaagactgagagtttgtctcattcatcatgtgcactgaatgcctggaggcagcacctggcacatggtaggtgcccactaaacattaatgttcctatgcacatgaggagacagctgttttaccagacaataaaacacagaacatggccggatgatggctcatgcttgtaatcccagcattctgggaggccgaggcaggtggatcacttgaggccaggagttcaagaccagcctggccaacgtggtgaaaccccatctctctactaaaagtacaaaaataagccgggtgtggtggcacacacctataatcccagcaactcaagaggctgaggcacgagaatcgcttgaacctggaaggcagaggttgcagtgagcggagatcttgccactcactccagcctgggcagcatagtgagactctatctcaaacaaacaaaaacccagaggtagataatgaaggcgggaggtgtagccttcggatagccatgctctctgcctggcccagaggtgtgtgccccacgtctagagcagcgcctggcacaaagcaggctctcaggaatgaatgaatgaacaaatgaaccaatgaatcctgcaggagtcagttgggaggcgaagagcctggaggccgccggacggcgggacccacggcctgcgccagccccctgcacaccccccaccccgggggacccacctgtactcgtagtcggagcccgccttggcagagccgtcctcagtgcggtagtccacgtagaaggtgctgttgccctcgccgccctggcacgtgacggacagcagcacggagccgcagttctccaggcagtggtagaggctaggctcgaagaagatgcggctggcgccgtcgtcttcgtcctcgcccgcgccctcggccggcgccgccctgcgcgaggcgtccgccgcgtgtctgcgcagcacgttcccggcgccggtcatcagccgcgtggcctggatgcggtagaaggcgcggctcttctgctggtgcagcagcgcgtagtagttggcgatgcccaccagctgctccagatccttgtccgggtgcttctgcttgaggtccttgaggatctggatgacctcgcggcggctggcgtccagctcgcgcgcctcggcggggcccgggcccaggccgcccagctcacctggggcctcggcgcccacgaacgtgccgtccagctcgatgctcttcggggggtcgccctcggcgcctatgatgatgccgctgcgtgggtcggtgcggtagcgcttgtacacgtacttgtagaagagcagccgcttgtcggccatccaggcgaataccacgcacaccgggaagaagaccagggtcagcagcgcctcccacacctgcgggcggcgggcgtcagggcgaggccgggcgggccgccttctccctccccgcctctctgtctcagtctctgtccgcctctgccactcctcatctctctccccaacccccaaccccgccccgtcgtctctccctatccctttctgtttcttttctttctttctttctttcctttctttctttttcttttcttttcttttctcttccttcctttcttccttctttctctctctctttctttctttctttttttttttatttgagacagagtctttctctgtagcccaggctggagtgcagtggtgcagcctcggctcactaaaccttgaaccttggcctcccgggtcccggttcaagcagttttcctgcctcagcctcccgagtagctgggattacaggcatgcgccaccatggccagctaagttttgtattttttttagtagagacgggggttcaccatgttggccagcctggtcttgaaatcctgaccttgtgatcctcccacctcgagctcccaaagtgctgggattacaggcgtgagccctgtctctttgttcatctctgcctctccccatctctctctcctccccactccccgtctctccccacctctttctgactgttcatctctgcctccccccatgtctctctcccctctcccccaagttctgttccccccatttctctctctccctcttctttccccatctctctccatctcaatctctgttcatctctgcctctccctgtctctctttcctcccctctccccgtctctccccacctctttctgtctctcttcatgtctgcctttccccatctctctcccccgagttctccgtttccccccatttctctctttccctctccatcttgttctgtctctgttcatctctgcctctcccccacttctctcctcctcatttctctctcctttccgtccctctcttagtttctctcaacctccctcttgtctctgttcatctctgcctctccccatctctctccccccatttctctctctccttccccccatctctttctatctctgtccctccctttttgtctctgtttggctcttgcctctccccatgtctggacgtgtctccatgtcctgttatatcctggtagatctccatctccctcccttgtgagtttctttctttttctctctcaatacctgtgtttctccagagctaattttttcccctctcccgtcaccgtttctctctctcctttcccttgtccttctcttagtttctatttccctcttgtctctgttcacctctctctccccatctctctctctcctttctcccacccctttccatcttgttctgtctgttcgccccctctgtctctgtctctgctcatctctgcctctccctatctctccccacccccttttctctctctctccttgctcccgttcctctccatctctgtctctctgttcctcacttattctctatttccctctcatctctgttcacctctgcctctccccatctctctccctccccttcctcccatctctttttaactctgtcctccctttttgtctgtggcctctccccatctcccccacatttctctctctccatctcgttctctctctctctgtccctgttcgtctctgcctctctccatcgctctctgcgtgtgctgctgtctctttccctccttgcctctgtctcagcggttttcttagcctttcctcctcctctgtctctctccctggctccctctcttttcttgttgcctcggtctccttggctccatctccttcttttgtatctattggtagatatctatttccctcccttgtgagtttctttctctttctcagtatctgtgtttctccagagctacttttctctctctccctccctctctctcttgctccccatctctgtgtgtgtgcacgtgcgtgcgcgtgtgtgcgcatgtgtgagcgtatgtgcatgtgtatatgtgtatgtgcgtgtgtgtgtcctgtgtgtgcgtgcttgtgtgtgcatgtgtgtatgtgtatgtgcgtgtgtccatctgtgtgtgtgtccttctgtgtgtgtgcatgtgtgtgtgtgcatgggtgtgtccttctgtgtgtgcgcgcatgtgtgtacgtctgtgtgtgtatgtgtacgtgtgtgtccatctgtgtgcatgtgtgtgcatgtgtgtccatctgtgtgtgtgtgtgcgcacatgtgtgtatgtgttctctttctctcctagtctcttcatccatctatccaccttttagatgctgagaaccatgcccagctgcccaggtgccaggaacccggacatcctcatccactaccaagcaacagacaatccccaccctgtggtcccagctgctgtcaagggacagagcctgtgtgtcttctggcctctctctccctccatcttttttctgcctgctccatttctcccccatcacctgggggtgcctccacttctccaaacctcgcccatcatccagggcctgctctctgttcacccaaacgccctcagtgccccacccatgacccctaccagtgcctccttagcatttgcctggccctcatggacaggctgtgtctctaacagagacacacatctggctcttctgcctcataaaaccagttcccatgcacagccagggcagctctgagttgggagcctggctttaccacagggatggctgtctcatctcttggtctatacaatggggacatttccaagactgaatgagcacctgcattcctagtgcacagcattctcagtttctgacacatggaaaagactcaagatgtgaaattaacattgcctggccaagcgtggtggctcacgcctgtaatcccagcactttgggaggccaaagtgggtggatcacctgaggccaggagttcgagaccagcctggccaacatggtgaaaccccatctctaccaaaaatacaaaattagccaggcatggtggtgtgcatctgtagtcccagttactcgggaggctgaggcaggagaattgcttgagcccaggagggggaggttgcagtgagccgagatcacgccactgcactccagcctgggtgacagaatgagactccatcttaaaaaaaaaaaagaaagaaaaagaaaaaaaagaacatcgccatcgttattatttagtactattatcttgggcttgcagaggcctaagactcagtctgctggtggcccagcacaggcctggcacatggaaagcatccaccaagactcgagggtttgccttgaagatattcatggaaagactcaaatgttacctttctcatcaaagatgaagaagaaaagataaaagagtatttatgggccaggcgtggtggctcatgcctgtaatcccagcactttgggaggcggaagtgggtggatcacgagggccaacatggtgaaaccccgtctctactaaaaatacaaaaattagctgggcgtggtggcaggcgcctgtaatcccagctacttgggaagctgaggcaggagaatcgcttgaacccgggaggcggaggttgcagtgagctgagatcaccccactgcactccagcctggcgaccgagcgagactctgtttcaaaaaaaaaagagtatttacgatgacaaggcccccgaaggccaggcacagtggctcacgcctataatccctgcactttgggaggccaaagtgggtggatcacttgagctcaggagttcaaggccagcctggccaacatggtgaaaccccatctctactaaaaatacaaaaatcagccaggtgtggtggcgtgcgcctgtaattccagctattaggaaggctgaggcaggagaatcacttgaatctaggaggcggaggttgcagtgagctgagattacaccactgaactccagcctgggggacagagtgagactccatctcgaaaaaaagaaggcccccagagtatcttaaaaatgagcctggtaggaaaaatatctaagatccagttgccacacctgctatcactgtgtttactgctggctcagagaacagtcaagacttgcaaatagtaaaactgcatgaagccaacaggcagatttgggaaaaggagccgaatgttcagcgcaagctgtgaaatgaactctctcccttgtattaattgaacctaccattatgtatattgcaaggaagtctctattcatcagaagacaatcccaaacccctaagattttccttcctccctgcaggtcaataaaaagtgattctagccgattcacaatgtctttctagagcacccactaagaatgtgtccagcctgggagggcactgtgacattttcaggtctcagtggagcaggcacacccctgagacagagtattggaaatctgggggtatttatgggctgccatcatcactagggagggggacatggtcttggcctttcctggcctgatgacatccagcaactcatgggacagtcccacacaatacagaaatgtcccacatgccggctcatttcagaacctgccactaacattcttatccgcacgggacagtcccacacaatgcagaaatgtcccatatgccgtctcatttcagaacctgccactaatgttcttatccgtgaaaacactgtttatgatagttagaatttataactctgttttatgtatttctttctttttctttttctttctttctttctttctctttttgagacagagtttcgctcttgttgcccaggctggagtgcagtggtgcaatctcggcttaccgcaacctccgcctcccgggttcaagcgattctcctgcctcacgctcccgagtacctgggattacaggcatgcaccaccacgcccggctaattttgtatttttagtagagttagggtttccccatgttggtcaggctggtcttgaactcctgacctcgggtgatctgcccacctcagcctcccaaagtgctgggattacaggcatgagcctttgcgcccggcctatgtatatcttttttaaatttctttttttttttttttttctgagatggagtctcactctgtcacccaggctggagtgcagcggctcaatctcagctcactgcaaacttcacctcccaggttcaagcgattctcctgcctcagcctcccaagtagctgggattacaggcgcctgccaccatgcccagctattttttgtatttttagtagagacagagtttcaccatgtcggtcaggctggtttcgaactcatgacctcaggtgatccatccacttcgacctcccaaagtgctaggattacaggcgtgagccactgtgcccggccttatgtatatcttatatgaagtattttcctgtatggtttaacatactgcaaatacacttgttttaaatctcgtggctacctgctcctctgcctagacttcttgcatgcaatggtttctgatctttttctttctctgaagcccagcttattcattataaatagatgcctgcatctggctcccttgtcatgagggtagttgtgatgaagcatttccaggtggaaatgcagactgttctgttagaaaccttttcttttttttttttgagacggagtctcgctctgtcgcctaggcctgagtgcagcggcgcgatcttggcgcactgcaagctccgcctcccgggttcacgctattctcctgcctcagcctcccgagtagctgggactacaggcgcccgccaccacgcccggctaatttttttgtatttttagcagagacggggtttcaccgtgttagccaggatggtccctatctcctgaccttgtgatccgcccgcctcagcctcccaaagtgctgggattacaggcgtgagccacagcacccggcccagaaaccttttctttaggcagggcacagtggctcacgcctgtaatcccagcactttgggaggctgaggcgggcagatcacttgaggttgggagttcgagaccagcctggccaacatgacaaaaccccgtctctactaaaaatacaaaaattagctgacgtggtggaacacacctgtaatctcagctactcaggaggctgaggcaggagaatcgctgcctcagagcgacagagaaagactctgtctcaaaaaaaaaaaaaaagaaagaaatagaaatcttttctttataacacagtttggacattatactgactttttgggaagccaaatgcataggggagtttgttaatgaatagctaacatttactctgtttcaggcagactattttaagtctttccacacggaacaattcagttaatcctcatggtagccctatgaagtcagcactctcatgatccccattttacagttgaggaaactgaggcctggagaagataaggaacctgccctaggtcacacagtgagggaatggcagaggtgggatttgaacccaaatctctggcttcaggtgcatggatcaaactctgaggccacaagatctctctttgattacctaagaatttcatatcagcagaaataaaggggatgtaacaaaatatctgttatattctcctttcttccttttctttctttttttagatagagtctcactctgtcacccaggctggagtgcagtggggccacctcggctcactgcaacctccacctcccaggttcaagcaattcccttgcttcagcctcccgagtagctgggattacaggcgggtaccaccatgccaggctagtttttatatttttagtagagatggggtttcaccatgttggccaggctggtctcgaactcctgacctcaagtgatcttcctgcctcgacctcccaaagtgctaggattacaggcatgaaccaccacacctagcttcaaaggcctttctgaaagcctaagtcaggacaccattcattttaacagcaccttaaactgtacgatatatcactgcacacttttcaccatggcagatgggaaactctctcctctttctctctccctctttcaggagccctgtcttctggtgccactgtcctcccctttcctcactgtggcttctgatccctctgttatatatcctccttcacagaaaacccacaaggcatttttctatctctagcttcagatccttcctgggaagaaactgtaactggcagaaacctgacagataggcaaaaatagattacacacatgtgtgaatgaatcctggacacctgcaaataaattatgcatgtgtgtgactgaattaggccaggcccataaataaattatgcaaatgtaggaggcagtcacggggttgtgggaaatacattaggcaaacgttgtcaaggaagactacatagtatgcgagttaagacatggggtgagcgaaaggctaatgattatgagaatataggtataaattatgcagctgtgggtctaaattttgtctcactattggaataaattatgcaaagtggtcacagggcttatattgatgttgggttggatgggagtatacattacactgaagtggcataaattatcccaacatcagaaattgatgatgaataatgaatgaattatgcaaaccgtgattacatatctggcaaatggctaaattatgcagatgtaggtatatatctatgcgagcccatggataaattatgcaaattgcactaagttactcaagccaattagcaatgtcagaaaacactaggctggattatatgcaagggtagtatgaattatgcgaatggaggatgtcttattgcaaaagcgggaatcagttatgcaaaaggtagggagtgtaggaaaacatgtgaacatacgtagcatgcattacacagatcacaggggctccgttagtacatacaacacccttttgggagctaaaaggtgccccttccaagtgagtgtactgttcttaagtgcaaaacagtgcgtccctctggacaaataaatgtttgctgcaccctccagagatatggctgggtagcatcagcaggactccagcccctccagcaggacttgccctgtttggctcaattcccttgtgtagtctggtgacctgcacaaccgtacttggcagccctctcagatgtgagtgtgcatttctgcaaatacagcaatcaacactccaagccaagagcacctctctggattttgcagacacacatgcaccaagaaagcatctatgcgtctttgctcacctggaccacaccgggggaaaaaacagcaaggatgagataaagccagacataggcgaagatgctccaagaggcagtgacaaagaagactctcaggtgcttgatcttgcggctctcgccggctgggatgacgtagatgcacacggcgatgaccacaaacatgttgaaggcagcgctgcccacgatggtgcctgggcccagctcacccgcctggaagttgtggccgcagacttcgatgactgacagcaggatctcaggtgcggaggagcccagggccatgagcgtgaggttggacaccgtctcattccagatgcgaacggtgcccacgctggtctcaccgttggccttggtgatggtgatctccttctcttttgacgtgatgacctcgatggccgccatgaaacggtcggcgatgatggacactcccagaaacatgtagaccatggccacaaagtacaccactgcccgtgccgccttgtcacccagcgacgggtcgtcgggctcccacacgggcagcagcacccccggctggcagcggtaggacccctggcagccccctgtgctggtgtcgctgtcattggccgggggaggcggcagggagggggttggggtggctgccccggagcatgggggagccgccaggaggagtgtgacccccaccaaggccaggggagccatggggggtggtggggtcctatgggggaggaggaggaggtctgggtgagggaagcaaacctctttctgtcatacaaaggtcaaagctcactggggaaggagggttgggggagaagctgaggaccaatgcaggcaggatggggactgagggcgacagagacacagagagtgacagacagagacccacagagagagagagagactgaaagataaggacagaggaacccccatgcactgctggtgggaatgcaaattggtctatgcactttgggcaactacagccgaacaccacgtatcatgcaattcagcagttttgttcctcggtatgtgcctgagaaataggtccttatgtccactaaaaggacctacaagaatgttcatagcaggccgggtgcggtggctacgcctgtaatccctgaactttgggaggctgaggtgggtggatcaggagtttgagaccagcctggccaacatggtgaaaccccgtctctactaaaaatacaaaaattagctgggcagggtggcgggagcctgtaaccccagctactcgggaggctgaggcaggagaatcacttgaacctgggaggcggaggttgcagtgagctgagatggcgctactgtactccagcctgggtgacagagtgagacttcatctcaaataaaataagaatgttcatagcagctttatttataatagcgccaatcttcaaacaacccagaggcctatcagcagtaaaatggagaaatacgtttggaggatttgcacagtggaatattatagagcactgaaaagggagtgaactatttgctgctgcacccagcacatggatgaatctcacagatgtcacaatggctgaatgaagccaagcacaaaagcactcaaactgcaaaattcactgagaggcagggagcaggaggctctgagtttgttaggagattcaaatggtctccaactcggccctttgaaagctcttgctcaggatttgggctgtggcgggtgttgggccgtgtttgtctgtttcaagtggggctggggaggggttgctggagggtctcattcatgtccctccccaaggtggtagcaggcatcagtctctccagcttccctgtgtctgacctgaggttttccccaggctctataagtggtgcagttccttaggggctgtgacatctaagaccctgtgctgggctttctgtcccatttgtgggtgtgggggttctactgtttcattatttctctccctacctctggtgctgagtttgagtggctattaccgtgtcttatctgggtttccttttaaaacacaaatcgctggacacggtggctcacgcctgtaatcccagcactttgaggctgaggcgggtggatcacttgaggtcaggagtttgagaccagcctggccaacatggtgaaaccctgtctcttctaaaaatacaaaaaaaaaaaaaaaaaaaaaaaagccaggtgtggtggcgtgtgcctataatctcagcacttgggaggctgaagcatgagaatcgcttgagccagggaggcagaggttgcagtgagccgagatcatgtcattgcactccagtctgggcgacaaaaccagactctgcctcaaaaacaaaacaaaaccaaaaacaaagcccacaaatcagcttgcctcatccccctactgttcagaacccccgccagctcccatctcactcacagcaccagcgtcctctccagggcccgtgaggtcctgcccaacctggccccgactccctctctggcctcttttcccaccctctcccccttgcccagtctgcctcagccaccctctcctcccctctgctcctcagcctcaccagacaagcttctgccttggagccctggcacctgctgttcccccttcctcgaacacgcttctctatttatgtatttttgagacgggatctcactctgccacccaggctgaagtgcagtggtgccatcacatctcactgcagcctcgacctccagggctcaagcgaccctccctcctcagcctcccaagtagcgggaagtacaggcgtgcgccaccatgcccagctaatttattgtagagccgggagtctctatgttgcccaggctgtttttgaactcctgggttcaggtgctccacctgccttggcctcccaaagtgctgggatcacaggtgcgtgccaccgtgccccgcccactcttcccctcatatccgctagccttgctctctctgccctttcaggtttccactctgatgtcagcttccccaaacaccccatccaaaatgacaccctccccctctggggagcacccctccattccacaggtgagaggaccaaggcgcagagaggttacggaacttgcccacatcatccagcaccaactctggctcccaggtcgcctctccaagagtggccctgactctgagctcctccgccccaccctcatgttgccatggtaacccagtggcttatcaaaaagagaaggagagaggaagagaggtgtcctgggaacctccaccctcccagacccctctgccaccagcctcatttcttccaggggcttccatttgcttgaaaagttcttctgagagtctaacccacagcctgtccccaactcacacctacatacccatgggctgggagctggctcctctgggggagggaggcagcgtgttggcagaacttcccaagaaggagagagcaagcgaggagcatgcctgtgtgcgtgtgtgtgtgtgtgtgtgtgtgtgtgtgtgtgtgcaggcaagggtgggggagaggggtgattcttaaagggccaccgcacaattagccccctcagcaaggcccctaatgatacgtctaattagcagccccctaattagcaacaacttaggcataattacaaacccaccaggatccaaagcaaaggctcatgctcccttctccctccgcctccctggctttcaggagaaacaggggccagccgggagtcaggaattcttctaaagcatcaaaccaaaccccgctctctctgggaggaagcctcggcctgggaagtcctccctcaggtttaaccacctgtccttcctgctgcagtcctcaagagagaccacagccaggtgatgcgggttctcatgtccaccctcctagcccaggggctgggtcaagcacagcctagtgcaatccctttttcctgcaaaacctggtttctcgctggggccttgcgagaggagcagtcagggagagaaagcactagataaatatttgtgaaatgaatgaccaagaggtctgagccctgtcaccagggaccgtgggctccctctgctcctggctcctgcctctccctctccatccaccagcagccctgaaacccaatctgcttttagaatccaggggcaaaaggatcaggtggagcccagggtgggagcggggagggcagatggcaggtaccgtctcccagggccatctctccctcccttcgtgggcgtgcggccagctgggtcggcagtgagcacccctgttctgcctcacgtgcctcttaggtccttgatcagaagaacaggactgcatgcctgggggtgggtgcagtctggcgtgccaggtaagacccgtccttcatatccctcacgctaccaccccacagtggggcggcaagggagggtgcttttctgactgtgcctgtgttggggggctggcccttgcaggaccgagctggggactcagacttctaaacatgcacatttactgccccagcatgagcgcaggcgctcccatcacctcaaaatggtccagtgtggggatcacaccacagagcttgggtgctcgaggctgtgatacactgataatacgtaaactgaggcccagaggaggaacagggctcttaacctagtgctctttaaagccatctgaagccccctccgtgggcactgtcacacagggctgggacctcacctgcagccagggagacatcatacacacacacacacacacacacacacacacacacacacaccagggctacaggcacagcctcgtaccttttcgccatcactcactctcttgcccaccttctccagggcccccttctctcaaggaaggcagacagtgtgttggccagggccctctcagcaccccccactgagacagtgtgaggctggcacaccaggaaagggatggaagtgagactgcaggaaggactggcccggtctaactcagtacctagtgcttgcccagagcaggaaaggcgctcagtaattatcaacaagaatgaatgaatcaagagctggacaaacagcaagaggtatggaagtgagacggcaggaaggactggtccagttacacgaggaagactggggaggttagattgaagggaggtctggtctcatctctactacagaggctaccggttaaactgcaagaaggaccggcctcagaacgccagaaacaaggcagggggaggtgggctcggtcctcaggggagagctggggtgggtgccggctgggaggagtggagagagcaggggagctctgctgaagtggggagaggagtttagaggactccaggcctgggggagcccactctgcgggtgggggggtctaattcctccaggtcccccctgccaggggcggagacaaaggtgtgtgggaggagggtgcactggctcccagggagagccagagaagaggaaagagagagagaaacagagactgagatatccagagacagagatggagacgagggggagatggggagggagggagagagagagagagagagagagacatgcggacatgggaagagacagagacacagagaaagcagagacagagagagacacaggaaagctgagacaagggagagaggcagagacacagagacacagagaaacagagatggcgcaagaggaaaggagagagaaacccaggacttagagacagagccccagagagactccgaacagaccccggcacagagacacagagagagggagacaggagtgagagactgagagacagggactcccagaggcggccagactctgctagacagagacccctgagacatgtggagagacagaaagatgagacccagacacaggaaggcgggggcagaggtagagagcgcgagggggggtgccccagacggggtgggggcggggtgtcctcgccccccagtacccaggcggtccccctccccagccgcccgagaaccaggagggactgaaggtgttggggcggctggtggcactcccaccccacagaaggtacgcgtgctgggccaggcagccccccacctccataaaccagcccagggaagccagctccaggcttcccgaaccgcccccactccgcacctggggtaaccccgtccttttcccacgcccccacctccccaccaatggggtctcttacctgcggctacagcctggagcaggtccccccagcgctgggctggcagtggtgggcgactccgcccgaaagagagagagagattgagagagagaaaagcctgagactgagagggagagccggggaggaggggagggagaggggatagagggaggagaagaggagaggggagggacacgggggagggggaggcggcgagggagcgagggagggggaggagccggagagagggggaggaggcggaggcgggcagagggaaggcggtgcgggaggcggggggaggcccggggaggggcctgggggagcagggagcccgagcctcctccccagcctccgggttcagcaccagaggcaggggacagcaccggagggcgctcctgtgtgtttcagaagcagcccccgccccccaacacacacacacacacacgcacacacacacacgcacgcagtctcccagccatacaagggccaacagctacaaatagttacagacttacagaactagggggagggcaagaatgtttagctggagtcagatccaaattcacatactgtgcctgcacagcctcacaaaggaggccagaaacaaccacaaagacacccattaataagaataacaacagctgccatacatacaggcagccctgaccacgtgcctggcatcggcagcacattattattatttgagacagggtctcactctgtcacccaggctggagtgcagtggcacgatcttggcttactgcagcctcaacctcctgggctcaagcaatcctcctgcctcagcctcctgagtagctgggactacaggtgcccgccaccaccacgccaggctttttccctccattttttttttttaggagatgggatctcaccatgttacccaggctggtctccaactcctgggctcaagcgatccttctgccttggcctcccgagtagctgggactacaggtgcccaccaccaccacgccaggctttttttctcttcattttttttaagagacggggtctcactattttacctaggctagtctccaactcccgggcttaagcaatccttctgcctcggcctcccaaagcgctgagattacaggtgagagccaccgcacaggtgagagccaccgcacctggcatgttctaatgttttttataaatttaggtaaatgctattatgagcttcacttacagacagggaaaccaaggcatgaggtggtaaatatggctccagattctacacccttaactgctgcaccgcacaattccccaggctgaggacgggtcaggtcaagaagagacttgcaggctgggtgcggtggctcacgcctgtaatcccagcactttaggaggctgaggcgagcagatcacttgacgtcaggagttggagaccagcctggccaacatggcgaaaccctgtctcttctaaaaatacaaaaattagccaggccaggtggcacacgcctgtaatcccagctacttgggaggctgaggcaggagaaatcgcttgaacctgggaggtggaggctgcagtgagctgagatcatgccaccgcactctagcctgggtgacagagtgagactccatctccaaaaaaaaaaaaaaaaaagaaagaaatgaactgcaaagggccaggcaggtggcctgggctcctgaagacacaaactcatgcaccctgcgatgggcccacacacatacccccacgcaagcacacacctctgcaaggcacaccagcactacacccacccccaatcctgctcccccccacaacagggggtgatggcgtgttagtcggtgtggagtgctccttctctagaggcggacagtgggagggagggggccttgctcgtgccaccggtcctgcccactgccagtcctggctggacaccgtcaggcctgctggccaggggagggagaggatccggcttcctccaacttcccacgcctgggcctggcttctgggaaagagggtgaagacaggggtggccaggagttgctgagctcctaactcccataaacgctcggtagagaactggtggctgggtcttccctgtcagtgctggtggtcagacttctgagtggacctccatagcgggaggtagacagatggccaaaatgactacggtgtctgcctctcccctgaacccccaggaagcagatgtcctgcccaacccctgcccccagcctggatacggcccagggaatgatcatcccccaaccctgctgacccagattctattcctggcctgcagtggacggaggacaagacttccatcgttcccaccctccactgatcctagagacacaggcctctgattccttctcctggtaatacagaacggagcacaggaggccgggctcagtgactcacgcctgtcatcccagcactttgggaggccgaggcgggcagatcacctgaggtcaggagtttgagaccagcctggccaacacggtgaaaccctgtctctactaaaaatacaaaaaaattagccaggcgtggtggcgtacgcttgtaatcccagctactcaggaggccgaggcaggagaatcgcttgaaccaggaggtggaggttgcagtgagccgagatcgcgccactgcactccaaccagtgcatcagaatgagactccgtctctcacacacacacaaaagaccacaggcaaggcaactcctaccaccacaggctgggagaatcaggcttgtctcccactccctgggcccccaaccccctaggctttttagattaggtctaagcttagccctttccagcatggtctagcctgggtcttctccctgggtcttgcctcagtgctctccactgggaactaagctcactttctgctggggtttaaccctggccccttgcacaggatctggccatagcaattttttgttggggtccaacctcagcattattcatagggagtctagcctcagaccctctgctacaaatggaccactgctttcccacagcagccctttctacccacaagttttcctctaaacgctcaagctccttacctttccactgggatctacccttagatctagatctttccactggggtctcatgtcagctctctccactagggtctaacctcagctctttcccttccattttacgtaatctgttccacagtggtttaacttttagcctttctgctaaggtgtcaccccatttctttctcttgggttctaccctgggatctaacctccggcctgtatctgggtctagccttggattccctctcccccaaatccctctccctcaattcctctgggtgaatccagcatccaacacagagccaggcatacagcaggtgctcaccaaatgcttgccgaaaaaaagaatcgagacaactgggaaatgatgttcttctggacgtataaataaccatcaggtggccaattctcatccagagtggacagggtggaatgggatcatccctgctttcaaatagggacattgacgtacagagagaggagtgggttagctggggccccagggcacagcttcaccaccctggggaggtctggggagagcatcctgtccttcaggacaccccccaccagcggctggaggtgagcacgccatgagtcgccccaggtctgggaagagtgggtgcatgggtgcttaagaggctgcattctcagcaggccctgcacctgccccgtcctccaacccctgtagccgacgtctcctctgctccacttgatgtcgaagccgggtcaagaccagctctgaggcctgaatcaggctgtgctgtggggaacaagagaatgagggggatggagctgaggaagagctgtgggaccacagcgggaccgtctggagtgaagcaactccaaaggccaggagctcggcccacgtgggagggcagagagcagaccacagtgtgtgggatgggaatgggcctctgtgacaggggtgaaggggagtggccttaagcgaatttctagtgggagggacaaagcctagacccaaatgtaaggaagtgagattagaaggaatataaaaggaatataaaatttagccaagcttggtggcaggtgcctgtcatcccagctactagggaggctgaggcaggacaatcacttgaacctggaaggtggaggttgcagtgaactgagatcacaccactgcacaccagcctgggaaactgcactccagcctgggaaacagagcaagactctgtctcgaaaacaaacaaacaaacaaaaaaaccaaaaaaaaaaaaaaaaaggccagggtgtggtggctcacacctgtaatcctagcactttgggaggccgaggtgggcggatgacttgaggccagaagtttgagactaacctgggcaacatggtgaaactccgtctctactaaaaatacaaaaattagctgggcgtggtggcgtgcggctgtatttcccagctgcttgagaggctgaggcatgagaattgtttgaacctgggaggtggaggttgcagtgagctgagatcgagtcactgcgctagagcctgggtgacagagcaagactctgtctcaaaaataaaataataaataaataaataaatctccttcaccaggccggtgcccccaccccagctgctgtgagcgctcacagctgcccctttctcctgggagttgtcctgactggtaggaactgcctccctgaaatgagttcctccctcccccaggaggaggcctgcaccccctgctcgaaactgctgaggtcgactcccctcccaccccaagagctggggatacctgcaggatgtgcacgcccttcagggagaccacggcaagctcctgcagcccatccccggtcaggtccacgtgagccatggccagcaggggactggagaagctccgctgccacagcagatggaacccgtgctgggcctcaggaagccccgactctgggccccggtacttataacacagcagttcctgcgggggtgaagaatcaggtcacacaggttgatggggggacagtggagggaggccggtgggtgtggctccaactgtcaggtcccacctgtccataggtggccaccaggacttctggccgcccatccaaatccacatcggtgaccaggctgcagaggacgctgtcaaactggtcactgccgggcaggagaagctggtcttcaagaccccggttcagcaggtccctgagggtcccaaatacagcatatagactggggtcagcttgcagtgcccagcacccttggcggatgctaagctgggtaccggtactgcttcccttctcaggcctagacacactggtcctccggaagcctagacatcatcatctcagatttggacatattcatagacccagcaaggggtcaacctgtgcactcaagcccttcatctcggagaccatctcactcccaaatggaaagccacagtgtcccatctgaggattcagatgcatgtgtcctcaatttagacacccacgctgccttcgtggagcccgaagagggcttggccctggcctggacaccttcaccacccctagaggggtgccagagctggctatagttgcttccgagagctgactgggaaatgttcccatgtaatcatgttcatggtttgaaagccaccatggtgggagtatttacactttggaaactctggtaaatgctacaaacctgggctttcctcgtgcatagccagtgattaaccattttccagcatacctactacatctactccagggggcacaggcatctctgctcccaccccccagcctcaacatattccctacaagtctagacttcaatattcacagcccccacccctgggtcacgagtatctgtacttgtccagctctgggtaatccacccagaggaacttactgtagagaatgacaaggttagaccacagtgcaaagaaagaaggttagaccacacccatgtgtctcaggccccctcaccgatacaccactgctggctccaacatgctggccacgagcacgctgtactcatcttgtagtggcctgtccttggtctctggagaagaaacatgaatggtaatcccagcactttgggaggccaaggcgggtggatcagctgaggtcaggagttcgagaccagcctggtcaacatgataaaaccccgcctctactaaaaacacaaaaattagccgggcatggtggcgggcacctgtaatgccagctactcaggaggctgaggcaggagacttgcttgaacctgggaggcggaggttggagtgagccaagatcacaccactgcactccagcctgggtgacagagcgagactccgtctcagaaaaagaaaaaaaaaaaaagaaacatgaatgaataggggaaaggttttgtggggacaggttccaggctcctcgtcataccccaggcccctttaatgagagacatgcaggttagatctcaggaaaaagtcttgaggctgtgctacacagggagggttagagattggcccatgagacaaattataagtcagacaccagaaggagaaataggtgttagatgatggcttaaaaagtctgaggttctgggtgtggtggctcatgtaatcccagcacttttggaggccgaggcaggcggatcacctgaggtcaagagttcgagactagcctggccaacatggtgaaaccctgtgtctactaaaaacacaaaaattagcctggcatgatggcatacacttgtaatcccagctactcaggaggctgaggcaggagaattgcttgaacctgggaggtggaggtgatagtgagccgagattgtgccactgcaaccagcctgaccaagactctgtctaaaaaaaaaaaaaaaaaaaaagacatttgtgcatgtatgtttacaacagcccaattcacaactgcaaagatgtggaactaacctaagtggccattgactaatgagtggagaaagaaaatgtggtatatatacaccatggagtactactcaagtcataaaaatgttgtcttttgcagcaacttagatggaactggagaccattattctaagtgcagtaacataggagtggaaaaccaaaaaatgtatgttctcacagaagagggggccaacctatgagtatgcaaaggcatacagagtgtataatggtgtttggagattcagaagcaggaaggtgggaggcggtgtgggatagaagctacacattaggtacaacggacactagctgggtgatgggtgtgctaagatctcagaatccatcactatagaattcatccatgcaaccaaaaccacttgtgtccccgaagtgattgaaataattttttttttcttttttgagatggagcctggctccgccacccaggctggagtgcagtggtgagatctcagctcactgccacttccacatcctgggttcaatcgattctcctgcctcagccttccgagtagctgggattacaggtgcccgccaccacgctccactaatttttgtatttttagtagagacagggtttcaccgtgttggtcaggctggtcttgaactcccgacctcaggtgatccgtccgcttcggcctcccaaagtgctgggattaccgcgcctagtcaaaacttttttaaaaaagcaaaatgccagtcagggacagaccccagtaaaggagcaggaatgatcaacatattgggggaaaaggctagactctgagtggtgggacagcggtgagtccaggagcatagccgggagctagaatgcaacaagagacacagtgaaggggccacagagcggggtgaggaaataccgatgtgagacgtgcaggttagagtacagagggagaggtggatgctcagccccagggtacggggctaaggttacaccaaagtgaggagaacaactatggaccctaacagaaaagatatgggttaggccccatgtgccagtcctggaagttaaattcacaagaggggaggggagggaagaggtgcactgtagctcaaggcctggagtgggggatccaggagagagggactggggtctgcacactttgggagaggggtgcaaatctgggtagaaggacccaagaatgcagagttgcctcttccctcccacccgctctctccccatcccctcaaacccagagctcacccttggcggccgagaggctgaacacaatcactcgggagatgggaccgtcctgcaggaccgaccacatctgcagaacctctgcgtggagagcgaggattcagagccccaaccccaccccggtcccgcccgcagccctgaaaccatcgactttccgcccccaccgttcatccccaccctagccccgcccctctgaagccctcaaccccaccctagccccgcccccaatccccaccctcatcccttcccccacttcccctacctcacccagcaatagccctcggccccaccctagccccacccggcaagccccaccctcatccctcaacccacttatcctcctcccctaccccacccagctccagccctcagccccaccctggccccgccctctagccctcaaccccaccccttaccccgcctcaccgcggccctcacctcgactccgctggtccacgtgggcgacacggacataaccactctgacagcccagagctgagaggcgccgggacgtgccggggaagttgtggacgtccagccagaggacgctggcgggcgggtggatggacaggacggacggccattgctgggcccagccccgcccctctgcctccccaggggcagccgcccctccctgtagccctgggaccctgctgcttgattcctcctggataatccccaccgcccaattcctctgaggtcaattctcaccacccgagggctgagtccacctcttgttttttctggggtcacccctgctgatcaatttctctgaagtcatgccgtggactgatttttctgagctcctccccggtgaccaatttctctaaggtctcaccgcccgatttctctgatgtcagtgccccggtccccagtggcctctttcggggcctctcctacctactggtcaggttcgtcagctctgggaagaggttttccacgggctgttcctcaaactgatgcagcccctcgttctggggaaaccaagacccaccccacccccgcttaagtcagccgtcagcttcacacatatacccacccagcgccagcccacagtgaatcccacagggctctgcccagcacgccgccccacctcacctccttgtagagatgaatggccgggtcgttcccactcaagagaaacacagtctcaagttgatccccgacctggaccctgaaagcagagaaatctagaacccaaggtagtggaatccacatggtctgagaaccagaactctcctcttgcaaaaacccctgcctgttgagaaccttaacattctgggatccagacactagacccagggttagaatctcagggctcaagctcctgagtactgtatctccttgaaatacataactgtagaaacgagccctcatagaatctcaaaatcaaggaatgtacctcccaatctcagaattgcgggaacatggcttgctagaacctcccgctcttagagcccgcatctactcctaccttcactctgtggattcaggaatcgaatgtggaactctagaatgaactgcagaaccttagaaagctaggacctcttcattctgaaaccctggtattctagaagtgctgttttctgtctccttaaaaatacaagaacttctagaatttgccatcatagatttcagattcacggaatgatagaatatccaaatcctagcaaggagaacattagtgcaattagaatcttcagttttggggactctcacctgttagaccagaggttggccaagttatgacctgcagaccaaatccaacccaccatctgtttttgtaaataaagttttattggaacatagccacatccattcatttatagtgtcaatggctgctttctggctacaatggcaaagtgagtagttgtgacagactggccctcaaagcctaatatttactatctggatctctaccaaaaaaagtttgccaatccctgttctagaccatctgtgttctggaatggaatctggaactctagaatggaacccacacactttggggttctagcaccttggtattctagatgctctatgttctatctcctcgaaagatgagaatgtcaggactttatcattacagaacctcagaagattctggcttctatcgtactgtagaatattcaaatgttggaatcttagagcctacgactctagaaaacttagcatctctgatcttggaatgtcagactctagaacattagaatctgggaattctagatgtgcagaattcccagaattcacaggtgctccatcaactctctcagattatctagttcaggaatggcagtgtggtggccccttggccatccggtccatggccaccttaaaagcatgatgctccggccaggcgtggtggctcacgcctgtaatcccagcactttgggaggccaaggcgggcggatcacctgaggtcaggagttcgagactagcctggccaacatggcaaaaacctatctatactaaaaatacaaaaattagccgggcatggtggtgtgagcctgtaatcctagctactcaggaggctgaggcagtagaatcacttgaaccagggaggtagaggttgcagagatcgagccactgcactccagcctggcaacagagcgagcatctatctcaaaaaaaaaaaaaaagaaagaaaaaaaaagtgcaatgctttaaaaaacaaatgtagaatctgattgtctatggacaagttcgtggtctccagttagctacagctttccaacctcagctgcatatgtgtgtgtgcacatgtgctccctgttatattacatttgtgctttccattctcacatgacctctctggtccccaaaggcattttagtttaatttcattttattttatttatttatttttgagacagagtttcgctcttgtcacccaggttggagtgctgtggtgcaatcttggctcactgcaacctccgcctcccgggttcaagtgattctcctgcctcagcctcctgagtaggctgggattacaggcacacaccaccatgcccagctaatttttgtatttttagtagagacggggtttcgccatgttggccaggctggtctcaaactcctgacctcaggtgatccgtctgcctcagcctctcaaagtgctgggattacaggtgtgagccaccgtgcccggctggcattttagttttcaatccctaatctagtacaacctctttattttccagaaggggaaacagactacaggggtctgtaagtaaagaaggggttcgagaagccagggtttctacatttacagtggagtgggcgtcgatgcgcaggggacactcactccgcatggcacagctggaacggagtgaactggagctccaggttcaggcagctctctgtaggcagggcacaggcaggttagcatgggggacctgctggggactctctccctcctcccgtccacgcctcactcacgggcaatagagtcaaggttgtactcagagccgggctcgtagtcgcagtaaatgttcaggaaggggctgcccttgtcccctgaatcctggcggaggacacggggttcaggggagggcaggggtggcaggagggatccggggcggctcagtggaactcaccatgtgtgtaaggaggagggcgaagggaggtggagggggctctaggtaccttgatgaacgtgatccccacaaccagaccccgcttggggggtgacttgttgaaagtgtcgatggagacaatctccgcatccactgggaggggagagttctaagttcagtgtcaggcagactcatgcttccaatctccccaacatggtgagctctggctaccgcaatgatcatgccctctggtctgagtcctgaccaccatcacctgatctctgttccctgggtactagggatcctgacctgtaagtctgaagaatcctgaaaccctaggctcatccgggccccaactatgcctgcccgctgatcccagtgacccccttaaaaccacctgatcccattcttccagcacggtgacccggctcagacagagcctcagaagccttctcaacaccacgttccaggcccccgccccccagcaccatagcgccacccaccgggaatgtagttgaactgcagctccttggccactggccggattttctgtcggaggtcttggtagcggaagccgagcaccttgcctttaagggtggcggccagcagctccccgcgcccgccggcgccgcctgccagcccgtacacattgctctgcgacgagaagcgcgtgaagctgtcctcgcgcaacggacaaggccccgcggccacggccgcctcccccatcatgcccctcagttaagcaccctctccgcagcccccgccccaacccgcactacccaacctacgactctctaagcgacctgaaccgccgggtgcccggccgttgcgcgggctgatgacgtacggaagctgccggcgttgccctctcccaagatggcggccaggtcgcctgctcgggcctcccaggcgactttgccccactgcgcccgcgctctcttctcctttccatttctggaccaaggggctgccataaggagtctgtgactagagatgggaggtggtggccacggcctctcgctgtatgctgtgtggaaggtcgaatcatcatcatcataaaacttaatattgcccttatgtgccaggaactactgtaagtgcattccatctaatactttattaaaaattcgcaagggggtggaggtaggtacttaaatccattttagagatgaaggaattgaggcacagaggggtaaagtaacttgcctaagatcacacagctagtaacgagcggtcagtactggaaaccaaacaaggtaactccacagttcactattttttttttttttttttttgagacggagtcttgctctgtcaccctggagtgcagtggtgcgatctcggctcactgcaacctctgcctcctgggttcaagcgattctcctgcctcagcctcccagcagctgggattacaggcgccaccacacctggctagtttttctatttttagtagagatggggtttcgccatgttgcccaggctggtctggacctcctgacctcaggtgatccgcccacctcggcctcccaaagtgctaggattataggcgtgagcccccttgcccggcctatagttcataatcttaacagtatcacctttaaaataattaatacattcttcttgcccccaaggaaaaatgatccagctataataaccacctcctttatcgaacacctacttggtgacagtcatgctggctctgataatctgattccttacaactgttctgcaagggcctactgttaccctccctgccggttcacttattcaggattcattgagcttttactatgtgcccggacgtcctttgcaaatctgtctcactaatctttgcaagaaagaaacctctacaaagaggtttattatcccagtttagagagaatcaaatggaggctcagaaagagtaagtccactgactgatatgctagcaagtggtggggacaggatgtaaaccaggtgtttccgactctggggccttcaggggttcctgtctgtgctgctttgtccctagaaggccatggaggtttgggtactatgtgcacatctgtgtatcatttccagaagacatgggttggccagctgtcctggacacctcgagcacacacagactgcaagctccatgaaggcagcaggctgatctcccttgatcacggccttatcgcctgtacctggaacacaaggcctgacacaaagcaggcattcagaaaatatgtgtcaaaaatcacaaactatgtgctgagcatgtaagagacagctcttacatgatggaaagttctcaaaggcagactggataacggaggtggcaaggaatttgtgatgattccagatttctggatgtggagagtagaagttcctggagggcagtctgggaatgccgtcagtgctgctgtattcccagggcctggcatgcagcaggtgcttagtgaatattcgctgagggagtggcacgtgggtctagtgccacttcagcagtgcgtttccttcaggcgtcttcccgccctagtaacctataagccacatgttgagcggatgaatgaaaaaatgaagttacaggttaggaaggaatcatcctgttaagaggtttccaatcctagctgcacacttgaactgcctatgaagttttaacaaaacaaaccaaaacaggccgggcctggtggctcatgcctgtaattccagaactttggaagctgaggcaggcggatcaactgaggtcaggagtttgagaccagcctggccaacatggtgaaacgctgtctctgctaaaaatacaaaaattagctgggcgtggtggcgcacgcttgtaatcccagctactcgggagactgaggcaggagaatcgcttgaacccgggaggcagaggttgcagtgaaccaagatcgcaccactgcactccagcctgggcgatagagcgagactctgtctcaaaaaaaaaacaaacccaaaaacccccaaagggtaggaaacctcagtcaaaccacaatttatcagagtgcggccccagtctggatacttttatttttgcaccatcatgcctaatttttgtatttctagcagagacagggttttgccatgttggctaggctgctctcgaactcttgacctcaagtgatccgcctgcctcggcctcccaaagtgctacgattacaggcatgagccacagcacccagccccaagtctggatacttttaatgactttaaagcatagccagggcggaccatcactgatttaggtcatggatgacagaaacagattctcacactatccttcagccagcacccatgatgggggcagacatggtaatcaatttcaggtctcagaagtctttgctgccattatcagtggactggagctgtgggagaagctgcaggggagagaggagcagggcaggtgtcaaggaatttgaacctcacctgcacttctctaggctttctgggctggagcccctctcccaggagtccaccctggtttcctaggcagcccctcctctgtgcaattactgcccctgctcacttcctgacattttcccatcatgcctgggcactgagcctccttcagctgtctcctctgtagcgaggggccctgcgcggggcagggtaaagcacatgtgtaccagacagggcccccaacatgcacattgtggagtgtggtggaggcagctggtttctgcccacctttcctgggcaaaggctcctgctatctcctcccccactccccagacccactcgggcctcagactctgcccaccaaagccgcttcctcccccgtcctgtgacagatggaacaactgtcaccggggcgttcagccttcctgccagagaaatgtggacatgggagattcggtgggcttccacccattctcatccaaagcagtcatgaggaccgtcacattcgaccctcccactggctctgaggggtggcatcaccaccgtgcatcccagttgaggaaatcaaggcccctggaccccaagaacccagagaaagatcaagatgggcgctctgggactcccaagccagagctcctccccaggcccaccgtccctgggtctcccccacctagaaactgacccagcccacacgtgtttcaaggatgcatgcgcctgacctcccaagagctcgcccagagtctgggggaccaggagtgtgagagggactggtgactggcccaggggcagagtgggtagcagaggtgaggaggaagagagactcatgcaaaagtgttgttttttattttctttcttgggccagctgcagcttccaaccaagaaaacctcaaagcattagggaaggagcaggtgtggggctggggtggggagaatcccctaagctccagggcccagggtctaacctgagaggtcggggctgcaggaagctgggggaggctcccggggctgggggaagaggagcctgcccccagcagaaacagcaggtctcagcggctacatgtgctttagagcttggctgggggacaaaagtgggagagagagagaaaccggcctcatgactcagctggtcaggagatagggggccagatgctgaccccaaatccccggcagcacccctagcaaataggtctgtatcaaagattctgtacagctggttttgggggtgaagggcacctatgggggcttaaataaatggacagggggcaagggatgtagcgagaacagagggtgactgtccggccagcagcctgggcctctggcgcccctgcatgctgacccccggtgccacctgcccactgtggcccgcggcactccccagatgggaaaggagggaagctctccagcaagtctcggccccacctctctctgagcagatgggacaggaagacgggcactggggggctgggtggggcttagcgcaggtcctcctcatcgccctggatggtcttcttgatgcgcagcagcatggtggtgagccactggtccagccgggagatggagtcgtattccttcacctgagggcacaccaggtgataggctggccatgctccccccgttcccaaccctgcagcccaagggcacttgtcccaaggttttcaagatctgtctctgtcacccctggtctctgaggaggagtagagggagggcttgaggccccaactcagccatgggagctccctcttgtctgtcttgactatgctgggcacatcatttcccttgggggagaaagatattgtagctttaaaaaaaaaaaaaggtccatggctgggcgcagtagctcacgcctgtaataccagcactttgggaggctgaggcgggcggatcacgaggtcaggagattgagaccatcctggctaacagtgaaaccccgtctctactaaaaatacaaaaaattagccaggcgtggtggtgggcgcctgtagtcccagctactcgggaggctgaggcaggagaatggcgtgaacccgggaggcggggcttgcagtgagccgagatcacgccactgcactccagcctgggcgacagagcgagactccgtctcaaaaaaaaaaaaaaaagtccagcatcctcactgaatgggtgggaaactgaggcctggagatatggaaaaggccactcctgagtgccatgggacacgggggagagaagccacggcctgctgggcatcccctccctgagctcctggctgagttgccacccactgtctggggcaggaggaacaggatggcattttcactgtcctcagttaggggcttccattcccaaggggcacctagggagaaatgcttgacatgtgccattagaggagtgaatcaggacctgagccggacaccactaagcccgggaatgctgggaacagagaaagggaagggagagagagccgcgtgggcggctccaccaggcagagggaagctggcacctctcccatgtcctcagctccactctccttctcaccccttccctccccgtctgtgcctcctgggtgcccaaggcgcccactgtgagtctcacacactcacctgggggactcaaggaaccctggtcttcagaggcagacagatgtggctctgaacaccagctctgtccctgaggggccaaggccgagcctcctgacctccccaacctcagtgccaccatctataaaatggggagaacactccctgcgcctcttggcgctacttgtaaggtttctggggtgactggagaaagaacttcacagtgggctgggggccagatgaaatgggtgaatgtcatggagagcgtgtctgagaagggcagctttcctaggagacccatccccgtgaaggggcctggccccccatgctggccactcaccgactcggtgtagctgtccacattctgctcctcgtgggcctctagcaatttctgcaagcaaatggcagagaggggtcaggggcctatgctgacctgaggtctggcctggattagatgaaaggacacgctatctgtatgccaggcctggggctggggcttcctgaggactctcagagggtcaatccgtgtgggttaaactggggatgggtacgggcgtgttgcgatcctgctgccctattcatcagaaacggcttgctctcagggcaaccttaccaacatagaacatcacacagaatgtgtgtgtgtgtgggtatggggggtgtgtgtgttgggtgtggtgtgtggtggaggtgtgtgtgtgtgtggtgtgtgtgttggggtgtggtgtgtaggggcacgtgtggtgtttggtgtgtgttgagttgcgtgtgtggtgtgttcggtgtgtgtgtggggtgtgtgtggtgtgtgtagtgtgtgtgcaatgtgtgtgtgtggggtgtgtcatgtgtggtgtgtgtgcagtgtgttttgtgtgtgggggggtgtgtcgtgtggtgtgtgtactgtgcaatgtgttttgtgtgaggggtgtgtcgtgtgtgtgtagtgtgtgtgcgatatgtgtggtgtgtgatgtgtttgctgtgtgtggtgtgtgtgtagtgtgtgtggggtgtgtggggtggtgtgtgtgtagcgtgtggtgtgatgtgtgtggtgtggtgtgatgtgtgtggtgtggtgtgtgtagtgtatgtttggtgtgtgtggtgtggtgtgatgtgtgtggtgtggtgtgtgtagtgtatgtttggtgtgtgtggtgtggtgtggtgtgtgtagtgtgtgtgtgtgtgtccacctagccatcctgagctccagcactccccgagttgtactttcttcatctggaaaatggagactcaaatggccaaacaaaacaaaacaaaacaaaacaaaacaaagacaccctctgagaactactggacaagtcttggcgattgtcccacctggagccccagccacccccgtctgaggttcgggaagggggaggccggagcacccagcacttactttcatcaacttgcattcccgggaatcagagaaagctgggaacagctcctcatacttttggacagccagctgggcagcagggaagggagaagatgagttagtaacaagagggtcctcagagctactggcctagcagctgaggggacttggggatgtcgggtgatattgagtcagctcttgcacccctcccccagcctcaggtgtcacctggctctgtgtctgtcagtaccttcccgtagctgagctcagcaccagcctggctgcagagatggctgcagggagaggtgggtggagggggaaggttccccagataggcacccactgcctcctcccacctggctcagctggggcaggggacaaatgagcacatcctccatgccaggcctggggctggtgcttcttgaggaccctgagagggtcaaatgacggtgagcccccttttcaaagtgaggaaacagatccagagaggggcagtgacctgcccagggcacggtgagacatggggtgggaatgggaacctggtctgacaaagcccaagcttttgcccaccaccggtgcccacagcagggcagggctctgtggggtgtgtgtgtgtggggtgtgtggggccaccaccccaggccgtgagccagggacaccaggaaatcctggactccgtgcttctgccaggcaatggtaaaaaaactccggccaagcaaaatctagcgccaaccctccagctccttcccgctggccacgccccctcccactgccctctttggcccctcttttgccaagtgtcctgaaaataggtgggcatgtgtgagctacagctaaagccacgacagcaggagtcacaaagatctggaacactggggctgcaggtccctagtcatgtggcctcaaacaagggactctcgtcccagcctcaccatcttcacccataagacgcggtgacaatggtgctgactttaatggggtgcagtgaggattcaaaaagtgcacccatgaaggaaagagcactaagtgaggcaggagctggacccgcaaaagcctccagggctgggtgggcaggtgatgccagcacagaaacacagctgtgagaaccacacttctcatccaaaggctggctggcaggggccagacgtgagggaggagcacgtccctcttcgggggcaacgggacctggcctggagataagcacatggtggcctggtgcggtggtcctgcgggcgtggggtgtgctaccttggcgttgagcatgtcgatgcagaagtggcagagggccgccttgaagaagtagtctttggcgctgtacttgaggagggggctgtccatggcattggtccccacctgtagccatggagaagtggcactggtgagctcagggcaagcagccagagggccagagccactgccaggcactggggggccagctgggagctggttcatgtcccgaggtgaggccctgttaacccaggaccccaagggcagggagccagggaccagcttggagaggtcagcggccagtgcgtgagcgaccaagatcagggtgtgatggtggctgggtgggggtggaggctgtagccaggtgttcgtgggccttctgagagcctgagacagtgggaaggaggcagcctggctgtcaggaccaacgggaggctggcatggcggtgggcagagcggcggcaggcggtgggaacatgagaggcggcgcccgcccctctctcccagggggccagctgcctgcctttttctcggccatcacccagggctccgtgcacgctggggggaccccatgtgacactccctccctcccactgtggatgaggaccatcgggccatggggtggggtgcccacggccaccctgggcctcttggcacttcttcccattccctccctctgggttctttagccagcctcactctgggcccctccaggaagctctgcgaggggtgtgggaggggcacagccagggagagagacggtgctggcacggcatggagtcgtaggtggagaacattcagccaggctgaagacagggtggggggatgacatggcaagggatgtcgggggagaggcagagggtgagccgggggaggggtggttccagaacaaggtgccggggcttaggaggaggcacaggccctgagagggggcagggtggaagccgccatccccacctgtccccacctgttcgtagatgtcaatggccttctgatactgctccagcagcgcagcgtaaccagccaccttcagcagacacttgttggctgagctgtgtggggaggagtagtgaggggaagtggtggcggtccctgcggggctggggcaggcaggaagggggctacctgttggactcctcgcctttgtagtagtctgcagactgctcgtagtgggcaatggcctggggagacacgggggatgggttccaggggagggcagggaagggagaggaggcctccgtgaagcttccacaccctccgccctgcctgcctgggacacagccagaccccattctccaagctctgccggcgccccatgcccccttctcggcactcagacaccagaggactcccctggtgggaagaagagagagcagcactggtcctggctgccagcccatgcagggccctgctgccactcaccttctcgatgtccaccaactctgtctcatagatctcagcaatggagatgtggtgcttggccgcaatcgtgaatcggccctggaggggacacaggaaggggctgcctgcgactcatgacctcctgcgtgcctgcctgctgacctatgacccttcaagttcccacccctcagccacgcctgtgaggaggtatgaagaagacctgaggtgtgaagaagatcgagaggtgggggaacacaggagtgagaagggagggccccagcactagaggcctggctatgcgtgctgggctgagcgggtgatgttggacaagccactccagggccttagcctaattccatcccatccacgagggcacagatggtgtgacaccagagagaatgtgagcacgagcacttggccaaggccctggcccttaggaagcctctgataacagccagagaggcggaaggaccagtccagagccacttggcaaagggctctggagaaaccaggatgggagggagggcttgagacctctgcccaagagtaccagctctgcccccaggccaacacctatctgtcagcctcccccaggcacacccagagctccccagggaggcctcaggttccaaggggcctcgcaccttccatccgcctccacccagtgtccaggcgcttgcctaactgctctgcaccaggggctggtccaacgccacccccttgctgagggcagtaggaaagggcaaggccctgggctcagccagaccttgtttcgggtctcagtgactcctgcttgtagccacatgtccctgggcaaatcatgtcacttgtctgagcccctctcctccactaaggaacggggatgacaataatgccaacctcacagggctgtggattaaaccaccctgcagtgtctggcctaataaatggcagctgctattattgttctaatcacagtcatccctgcagcactgccctgaacgcaaggggtagggctcgtgtccctgcctggggttggagggctgagacagacagggcaagcggagaggcaaaaaggagctggccaggcacggtggctcatgcctgcaatcccagcactttgggaggccaaggcaggtggatcacttgaggtcaggagtctgagaccagcctggccaacatggtgaaaccacatctctactgaaaatacaaaaattagccaggcatggtagcacacgcctgtaatcccagctactcgagaggctagggcacgagaatcgcttgaacctgggaggcagaggttgcagtgagtggagatcacgccactgaactccagcctagatgagagagaaactctgtctcaaaaaaaaaaaaaaaaaaaaaaagagagagagagaaagcactgacaggagccccggcctgggtgggacccttcactctggctccagttggcagctgcccatctggtctgcatctgtcgttggcaacgcgccctgggggcagggcaggtgctgagcctcctgtgggctctgcctatccctgtggcctgctgcaagatgcttatcaaatgtgacacttgcgggaaggctgggcaaggggaagtgccggacacacactctccagtaacctaatttctttttttgttttgagacagggtcttgttttgtcgcctacgctggagtgcagtggtgtgatcacagctcactgcagcctcaacttcctggactcaagcgattttcctgcctcaacctcccaagaactaggaccccaggtgcatgccactacaccaggctaatttgttgtagagaggaggtcttgctatgttgcccaggctggtctcgaactcctgtgcccaaaagatcctcccacctcagcctcccaacatgccaggattacaggcatgagccaccctgcccagctcaataacctaagttctatgaatgaaaaccatgactgcctgtggagtgagggggccgtcaggctggtggggagctgggtgaagacccagccagcccaggccagctcaggtgacctaatccccccagctcccacttccccctccccaagtggtttggccgcagaataagaacagtgctgggggtgctgaaagaggggacgcaaggctggggcaatgcagtgggacccgggggtgtcaggacaagcaagcagcccttaccatgtctgtgtagatctcgattgctcgcatcaaacagttaatggcctctggagagaaagggaggtgggaggagacatgagaaagtgaagtcgtttcagcagaagctgaggagaggaggcggacgcaggcgcacctggctgccagcagagagatcaataggcgctcagagctgccagcgctgccacacactctcaaggggctgggaagaaggggacggaatccctgagccccaggaaatctggtgagagggctgactctgcagactgtgacttgctgggcacatgcttctgggggagcccttctctcctcgggctgccaggatgctaccagcttcccacaaccccagggacagggcacagcagtgctaggccaggatgatggccagactcccacggtgttttaagacagacctgccaaggccctgctcttgaaggactgagctgctggcaaaggggaaggaggcatgggaggcggccaaaccagcatctgaggtggtcttggaggcaacagggtgccaggttctacctgggctctgccaccatctctgcaggatcctgagcagcttctgctcctgcaccaggaggacctggacctctggcacgaggaggctggatgtcatcaacactgagccctcagtgtgctctccactgccccctcttcctcgtagctcagcagtcgggagccctctgctcagtccctttaacctagtcctgccacccaccagctcctcaaaggttttgccaaaaaacctgaacacaccaggatggcactgaggaagaactgggctacctttgttgtactatctcttgcaagattttaaatttgggaaaggcttttttttgacaagttatttggaggagagagaaaagcatgagtgggaggcattttctagcagacagaaatgagctctcagggggtattttttaagaacaccattttagcacatctcaggaggacaggggtgttgtggggagggaggcctgggttggggagagggaaaggcagggagcttggacaggccacagggcatgggctctgagcttcagcctgggcatctgaaagttcctggtcaccgtgggggtctccatggtcacccaggccatgttcgcctgagaagagggtgctaccaagaagcgccggggctgggctcctctcaaggggctcacggtctggatgggactccaaactccctccgtggggaggcatctggacagaggctctttgtctcaggtctgtggctgggctttcagggagtccaacccctccttctgacatgtaaacagtggggtccataagcactcctctggggagtggggtctgtaggttttgtccaattcagaaagacctctggggatctaaaagggactgagagaaggtacagcactcagtccaggttctagggctgacagaccgagactgtggcagcagacagtggaaacggtggcaaaaagggggcagatgaggaggaaggggagagaacacaacctaaatccggcagtttgaagacacatacatcctgtaatcggcggacccagaagcaacggctaagccgggccacgctgcagaggagagcagcagctggagtgaggtgagaggcccgccttgccccgccccacctggctgcagtctccacatggaggccccgggctgctcactggttcactctcctggccggaacacccaggacaccaacctggcaccctgtgggctgaggcggcaaaggctgctgctccgcagtgagcagtgagatctgcagctgccacctgggcctgctggcactggctctggagcacccgccgtcagcatggcacagtccttgcagtagcagcagggagacagcttaccccccaggcagcaacatggactcacggggttaagtcccctccatgtctggaaagcggcgggccaccagcagacacctgggacagctggctcctggacgagcttctgacacactcatgactgctactcttatctcaggtcaccaggccttgtgcactcggacaggcagagcaacacccagttctgtggcctggcccctcctgtacccacccacagagggctggaaaggggctcagagcaatacagcccaagttggggagctatggcccaggccaccgcccatccccgcagtcactcctaccagcgacgcccaacctgacttctgcgtctctgaagcccttcctggttacacttggtcatctcctccttagtaaaatgggggcaaatcacagaatgcacaaagaaatcaaatgggttaaaagatgccaagcatctggtacacagtagaaacccagtaaatggcagctggggaggaagtgggggacaagcaggggccaggtcgcttctctgccccaggtacacacactgcccccacccccaactatcaggcaggcctgggaagaggcctcgctggcccgagtctgccctgagcagcagccatggttgggtaactgaggaaccaataacacatatgagcatcacccttccccacccagagccaccaaggtggcagcaggccaccctctgcgagagggagaggaattcgggagcccagtcgggcctcaggcacactccagctgccacttgggggcaggtccttctggagggagtcctggaggaagccctagaagtgctgacccaagacagaggccttctaggctgctgaggagaccagtgatgaggacggccccagggtaccggccacctgcttggggaagccaggcaaggttccaaatcgggcctccagcgctgtctcacaaggcacccggccaagggcagaggctgtggggagcccagggcaggcaggggcccctggactgatgaaagccaagggtgtcctgactggaagtttatcacacaccaggtgccgcgctgggcatgactgcatcatctcacagcagtctctgctttaacagacgaggaaacagaggcccaaaagactgacttgcccaggatcacaggggaggcagggtcctcccagaccacccaccacctgcgctgctgagccacacacagttgctacatgacattctctgtgaggcttttttttggggacaggatctcactatgttgtccagactggtcttgaactcctgggcttgagcgatcctcctgcctcagcctcccaaagcactgaaattacaggcatgagccactgcacctggccttgtgtgaggcctgactagcctcagacacaaagcagccactgcccttgatgccaatgtgccccttgccccactgggagtcatggctggcgtgcgtatctttaggctgtagctctggaagctgcactaacacccttccctgctcaacaccacgtccccagggctctggacacggcacctgctctcagctctacccaggtgaggctctcctttcagaactgccccctttcttccttgaaagatctcccatagccaaattcacgcccccagcctcagctctgtgcaagttggcctctgtgccctggatgtaacatcatctttatactttcctaccggtcggagtcctcagccaccttctgagcttcctaaggccagggaggggccacatccagactccaggcccacaccctgcagagtctcgctggagagctagaaaagctcagatcaaacgcaggggagggaccccaccatatcccactgccaggcagggcctgtctgcaggaagtgaggggtctgctgaaagagcaaatggcactctctgttcggcagcctggcgctcagtgttgccccagagtgtccttccagtcactccagatggggcagcagctgaacgtcacagatgctaagacagcacctctaggccaaccagtttcccagggagcagaaggaaaggcttggcggggcagtttaatggaaggcatggagactccatgtggtgaatcaagcttaaaaccaacccagggtctccctgggtcatcactgcatcaaccacgcagcctgctgtggcccagtgctaccagccaggcaagccccatggcccacccagttacaaggctgctcctcggcctcttgccaggcctgagccccaccatgtgaccactgaggccaacgcatgagatgcccagctgctgaggagcaactggtcagtctaaggacagagaagagctactggtcaacacaaattcatcctcatctgggaactaacacgtcagatcacgacaaaggggtatgccagcagttctcaaacacgccatgtgaaccagtgctcactgatccatggaggaagctccctgcactgctgcaaacctgtcttctcttgggaaggacaggcttttattccaagattatatagctgctttttattttttaaagattcatatattttccattcccctgagatgacagtgacaatagatggtcatttttaaaaactgcctgtgctttctaattagcaacctgtacctggcaccaacattttaaaaaataaattaaaattcccgccacatgcaagcaaacactgggctggacctcctcttcgggaggcacccagggggacaaaactgttttctcaccatgagtcagccccaaactgggtttctgtccctagcacgctctcattttaagtaatttgttctctggcaactacatctcgggctctgttctctctaattcctccccaggatgtagggaagccaggttgggctaatttccgctcctttttcggcagcaactcctacctggctggtctcagaatcctccccgccccccacaccgctcccttctgcatgttaattctgacaacagaacagattttcctctctccccggcaggcggtgggtctgcaatggaactcccactcccaaatgctccgggattgggaaggggtgatcagctgcaccgacaccaccgacacggtagataggggggcggagacttgagcagggcgcgaatgccaactggaaggaagagagccagttctaaagtcaacgctcactctgcctcaggcacgcccctgccagcctatcacatgtcggccactggaaaaaccagagccgccaggaaacctgaggaatcaatgcagggtgctaggatggcgctccggacagccagcccgtgtggcccgcagaggccctcaccttgggggtcggctttcttgaatgcgttgccagcgtccacaaagcaggtggctgcgtcgtgcttgctctggagctgcaggtgcagctgtgcagcctggcagaacgcgtttccagcagctggaacagaagagaagggcagtcctggcctcagtggggctccacactttatgaagccacagagacactgccctgggaggtgggtcgggctctcgagaatgcggaaagagtccccaagacaggacgagggtgacctgagcgagcccagaccgaggcctagaactcaggtctcctggctcctgcgctcaggtctgctggctcctgcgctgaggctcctggtggcccacctgacagtctctgagggcggcaggaagctgcctcgggggaaggccctgagccccaggtatatggaaagagagccagggtaagcccaggtaaaacaccatgtccctaatcccagctatgccagcatttccagggccaccacttctaaagatccaaggagaaggcagatagagctgagttggaaaggatataaaacagagtgaggtggcctcctgcacctcccggcctgggcagtcctccccaggggagcctcgaagcacagggcccagaaccaccactagaaggcaaagtacaggctgaaatcatggggtggcttcggaggggtattttgggaagcaaggggcaactgagattaaaccacataacatcttcccatctactcccctttccaagtcctgtttctttttccacagctccccaaagctcttcctgattctcccaactcctctgcctctgttcacattctgttcccttcactgcagatccccatggacaaggcacttgcatgaattgtgaggctcatggagttggggtcggacaacacagagccggctccctccaggagctgcatgtccagagagggaaacaggatgtggacagcaagaatgaatacatgcagaccagtgcccatgggcggagggcagaagagaccgtgcctgaagcctcatccatcctgtgctcatctgcacacggtcagcttctgtgggtcccaagccattctgcccacacatctcctaactgacgtttgggaggcagcagcatctctcctcctcctcgtgcagctgaccacctccagctcagctctgaggcttctccccttcattctcctccagctgaatctgagtcagagtttctaagctggaagaggaccaggaggcctggccctatcctcttaagttttgagcagcagaaaagacaaagccttccgggttttcactatatgatttcattattttcaagagttccaaatttgagtataaaattacggccaggcgcggtggctcatgcctgtaatcccagcactttgggaggccgaggtgggcggatcacgagatcaggagatggagaccatcctggacaacatggtaaaactctgtctctactaaaaatacaaaaataagctgggcgtagtggcacgtgcctgtaatcccagctagtcaagaggctgaggcaggagaatcacttgaaccagggaggcggaggttgcagtgagccaagatcgcgccactgcactccagcctggcaacagagcaagactgtctcaaaaaaaaaaaaaaaaaaaaaaaaaaaaaaatttcaagaaaaggggatattaccggggggaaatggcctagggcttttctttgaagagtttgggggcagaggtaacaaattttaggggaaaagcaacacctatgtaattaaaaaataagctttttttctctagaggaattttctaagtttgggagcataaaaatacaaaaaacatttggctttattcacaacgtattttgtgaaaactcaggaataactctttgaattttggggaaaccaacaacattctcaaaaacgatgataatcaattttattgtgcacctctgcaccctgcctccatggtcccaccaccaggttccctctcctccacagtcagaagttcctccctgcattcaaacactgggtctcttgccgtatttccttaattcaatcttggtgacatgaaagatgtatgatgaaatgagcctcgaaagggctcaacacactggcttgttggacttcttgggcctgcagggagctccaaacagatctccagcctccctgagcccaaggggctcctccccacccctctcctctgtgaagctatcctgcctcactggggcaggttaaacactcaggctctgcagtcagagccttggtttctgaatcttggttctgtcacttactagttctggcatcctgggcaagagactaagccaagcctcagtttccaaatctgtaaaatagggatatttatagactgacccttagggctgctgtgctaacgcaattaaatgatgagcacttaggactcaacaaacagcagccatgattcacgttgttattggaatcacctgaacatcctcccccagcctagaatttagacactgatggaagcactaaggaagttaccaggaaacctgaagttctgaatttaaggaggactctaagagctcatcaatccacatgggtttatctaggtctaataatctatttattcccatcctctctgtcctttcaccaaggccccatgacccagagtataaagtaacccagcaggcacaaaacaagagagcaggccagtggctttccgatgccggagagggcatacaaagagaaagggccctcaaggccaacctctcgggcaggcctgtgtgagtggaagctgagggaggaggagagcaccttggaggagctctagcggagatgacataccactccagtttttggccattttgaacatgtttgctgctctggcgtagatttcgcatgcttcctctattttggatgagcctctggggaaaaaggaaagaaaaaaaggagacaatctagtcggctatccaggagaaagcaagcattctgctccagtgccgggcacagacgtgcccctacccctcacccttcacctgtgaagccagcttcccccaggcctcttgagtctgtggcccccgcccctgcatacaatggcacactcacttcgggcagaccagctccctccgggagtactggggtagatactgggtgcttgctggggtagtggggcgaagagttcctgaccccaccacaaccccagggtctgacagcctcttctacttcctgcctgggatactaggggcccactgggtcccaggcgcgctacaaatcccctttccccgggagactgcaaagcattctgggggactagcccagtttaagacatcgtgttgctttcgcagaggcagccttaatcctgtgccttgcactctgtggttgctcaataaagaccttgcagccctggagtgtgtcattaccagctcaggactgggcatatatatcacacagccatacaaagaaatgggaagcactattttaaagtgtagatataagatgttcccatttgtgtttaaaaaaaaaagagggtgggctgggtgtggtggttcatggctcctgtaatcccaacactttgggaggccaaggttggcggattgcttgagctcaagagttcgagaccagcctgggccacacggcaaaaccccaactctacaaaaaatacaaaaaattagcagggtgtgatggtgcacgcctgtagtcctagctactagagaggctgatgtgggaggatcacttgagcctgggaggcagaggttgcagtaagccaagatcacaccattgaactccagcctggacgacgacagagccagaccttgtctcaaaaaaaaaaaaaaaaaaaaaaagagaaagagagtgaaaataatagaaacatacatgtttatataaacataggatatttctgggcaaatacacaaaaacctagtaacagcatttttctcttaaggtgaagcctgcagaaggagggccaggtgtgggaggcagacttattcactggacatcccgtatttgtactgtctgaatttttttttaactgtttgtacatcttttcgagaaaaaaaatatatacatatatacacacacgtgtacatatatacacatgtgtatatatgtgtatgtgtatatatgtgtgtatatatctatacatttacacatacacagacacacacacacacatatttttaagtattaggatttatatttggccctgtggtccagcaatgaattacatctctagcaatttatcctaaaaaaactaatcagaaaagttacaaggatgttcagcatagcattatttaaaacagcaaaaccccccaaaaacttattgtccaacagtagggatacactgggagatagacaggaatttgaaaacataaagggtaccctgtttgggcagcttcactctggcttcttgacctccacatgtacataatgagcctcctcttgacttgggggacctcattagtacctcaaacccgtaagtcccactgcattcttctgcccttaataatacaaccaggcttagcccgcgaggtctgtagtctctgtaactgctcaaactcccaatatctacataatcagtagaataaaatccacacactctggagtcccaccaaatggatttcagggcctctcttcactggcataactagtgtttagtttatttttaaggaagagaaaagggaggagtgggtactttcccattcaaatcatcctcaccatcccatcccacaccctgtgtcaactggcccaacattatacctgggaacttgtccacaccaaccccagctgtggaggggctcaaaggtaattttgggagctgggatgtgagcattccttccctctgcactgcggattcagtgtgtccaacctgcccatccctttcagccacatgaagtgctcatttcatcaaaccagagtcccacagccacacactttgggattcgctcagtagggtctggatggggcctgcaaatgagatttttaacaattggggtttggggggcccaggtaattcagctgatcaggtgagtttgagaaggaaaaattgactgagaccgactacctggaaagcagccaccagcgatcagatcagcggccaggcctggcaatgtcagcaggcaaataaatgcccccacggtgggcgggctggttgggccagggatcctggcctcctgaatccacatcacaccaggtaaataatctatttattcctatcctctctgtcatcttgccagatgaaaagcctaccctctgccttctggggctgtgctgatgctgtcccccaccctctgctgtccctgggaagtggccctgagcaatgtgttcttcccgcactcgccctgctgcactctgtcttccctcacccacctcacctcagccagcccaacacaccttgggccttgtttggagtgacttcttttttttttttttttttttgagatggagtttcgctcttgtcgcccaggctggagtacagtggcacgatctcagcttactgcaacctccaactcccgggttcaagcaattctcctgcctcagcctcctgagtagctgggattacagatgtgtgccatcacaccctactaatttttgtattattagtagagacagggtttcaccacgttggccaggctggtctcgaactcctgacctcaagtggtccactcgcctcggcctcccaaagtgctgggattacaggcatgagccaccgtgcccagcctggaatgacttctttagaacccattcctggccttggagaggtaagaaactttcaaaaccttctggctgagaatcctgaagggtcctttggggcctggctgcaaaaaaccctcagaaggaccttctctggaatgttctcttaaagggacattttcagaccttaatcacaggtctgcccaccccacaggtcccccagctcagccttcccttctttttgagtgtgactaagtcctatccagctccatgcactctctgaaaaagcacagaccctggatgggcagaaatgacccacgtcactgagtggcccacagcgggcaatcaacaatgagcagagtcagcccagccgggtttatttcaggacggacacaaagcctaccagctgcccgggctgaaactctgtgatcccaggctaagcacagccaaccctgcacggggtcaatgattctgtggggtggaaaggccagagggattaacacctgctcaggccccaggcttgcctccttcttcccctgcaccccgcggtcttgcccattaccatggccaggggatgacaggagatctccagggtcccatcctcttcttttagaaatgggagtgaagtccccaaagggggaaagtgacgtgcctaggttccagtggaagatcctgaagaagccattcacatacacatttattcacctggggaacaggtatccgagcatttattacgtgccaggagataacaacagtacacgaaaggaaaatctagctgggcctcctctcctgagggcctgggtggcagcgcatgtgacagctgactgtccctcccccactgacctcccccaagctgcctctgcttcactcctcccatcccacggctctgagccactccgggaatagagggaactggtttgggctgcctgatgcagggctgtctataattacccgctcagctttgctctctccccctccaaggcggaggaaggagtctcaggtctcccaaacacagccaccaacctcagggactgccatatggaaggctgggcactgccaggaatacacagatgcctgatgggacctgggccagggggttgtgcagggcagagtcttagccccctccttccttcctccatccaccaggcacttcctggctgccagaaatacaccatgccctgagacccaccacctgcagctcccgaaggacctcacgaggcagggtggacaaagtcaggcccccatttcgggtcctggactcactctatctctcttgcctctgtggaagccacagccacaggcctacggtttcctcctcagacttaaggcccactgccccaagtctccagtcagcaccctcagtggggaaggtgtcctagggcccgtcacatgcctgtgtcttccctgtaagcccacctcctgcacggctctcgagaccatgtgccttaatcacggctggcgcatggcgttccctgcctcccaggcactcccctggaaggagcccacagctcctcacgagagccctttgggtgctgcccttgctttacaggcgaggaagctggggctcagagagggcggagggcttgtccaagcttaccctgccaggaagcagcagggcttggaaagaggactggggccctggggatccagtcctgcccttgcctctcactcagtgatcaggaaggcttccttccccatgcccaaggctccttgggaaaataaggagggaggacaaggtccctgcctgcccccacccctcctctagattaaagaagccagggagcctgtactgcctaggcttccctcatctcacgagcagaggctgctctctgctggggctgcgtggagcatcctctaggcaaaggagtatgaattaagccagccccctaccgagcctgccagtaacaagccaacaggcagaaggaacgtcagaaaaagttaaggctgcctgtggtgcagggtccaccctggcacagggagccgggggccaccagccctgctagtccactgactgcactggagctgggagctgccagaggctcagcatcctgaaggcaccgccaccagtatcacctggaagcgggaaaccaccagctgcctcccgccactctgcagtgggccttgcctgaccaagcagagtatgagttcctgcagggcggggcctgagcccagctctgctttcccatctctccacaagccccagttaacaacggtgaaagaataaagtgtcacaggctaactgcccagctctgaaatcgccacaggaccctcttgtgacatgcctgtctgggcaaagacaaggggtagaaagagaatgactttggggtggcgagacctgggctgaagtccgtttcaggtactttgctaagtgttcgacctggggctagttatccctgaggctttttttttttaaataagagatggggtctccctgtgttgcctacactggtctcgaactcctgggctcaagcaatcctcctgcctctgctcccaaagtgctgagattccattctttatctacaaaatggcagcatgtctggccacagtggctcacacctacaatcccagggctttgggaggccgaagcaggagggttgcttgatctcgagtttgagaccagcctgggcaacacagtgagaccccaactctactaaaaattagccaggcatggtggcatatgcctacagtcccagctacttgggaagctgaggtgagaggatcacttgagcccaggaggttgagactgcaatgagctatgatcgcgccactgccctccagcctgggcaacagaacaagaccctgtctctcaaaaaatgaaaaatgaaataaaatggagacaatgaatctggcctgggaggagtctttgtgaggattagaaatgacacatagtcaatacttggcacagagcgcagaatggaaaaggtgctcaatggttgctattacacaaaggaagagaaatacgctcaaaggggtgcctgccacccaggaatgggaattctagagagtttcttgtggtggtaaaaataaaataaaataaaataaaataaaataaaataaaataaaataaaataaaataaaataaataaaataaaataaaataaaataaatgctgacagtagtcagacaggcctggcctcagcgccagctcatcgtgtgccagcctgcgtttccttatgtgtaactaggcataagactccacaccttgcagggctgctgaagcacgagcaatcttgcaggcagcaccccacggcgtgcccagcagagagctggccacaccacgggcgttcagtaaacgagagcatccctctcatcaggccccgcagaggaccgattccaggcacgcttccctacttcagaatagcagcatgggcttcatctccatcccagattagctaagtaatgctcctccttcggcttccagagtcctggcctcccatgccccaccccttactgcacaatgctcaaaatacatacaggcccacggcccttcgagatgagctcagagccaggatctcacctgccacacggcacacagcctggcaggcgccctgtttcttattttcttatacggatgccctcctgcaccccaacgggattacatttcaccacagaccaagggcgaatgtacttcctttttcttaaaaggtgttctcaaagacccttgcctctcagtagccccatcccaaaaaggagacggaaatgtttgtatggccaggcagcaaagtcctatccatcaggaaagccaggaactctcggattccccagaaaccttgtgtgccctcaggaaagactccactctgagactgggcaagagatgccaagttttcagttgtggatcttggcagctggcagggcactgtgattcaccagggtgcccactggaaatggcgccggggtttctgcacgctctgcagaggaaggcggtctggagagaaatctggaagctcgtgcccacaccagtctcagccaaggccctgggcaggccctgtacagacaagctggccctcccagggtcccgccgttattgcctacaggtagttcaaacaggaactgatttgtcaagatctgatcttaggaatgcactgtttgtatacagaacaccctctgccacctatttctccagcacttctagctcaacttccaatgacaatacctactaataaagatgacagtgagcccttaataaacattagcagagccaggcaacgtgctcccaccacttcccacacatcgtctcatttatccttaaaaccacctgaggaaacagttaccatgattttcatttcacagatgaagaaactccctctacacgtttgtatccaagaggaaggaagtttttattttggctattttggggacaggggaggtggctgggaaacatcagggatgaggaaaagccccagggaacagagccgccattcagaacctgcaggatccccaaacggcacagcaggcactctggattccccaggagacacgcagcagggaggaggaactagtgtgcctggactcagccatccccttctgctgctggctcactgtgctgtagttaggaagtctccgtctttttgcttccagagcagaagtttgagctgcgcccccatcaccaaggggaggaacaggtatggctttgagcttctcctaactggctggtgctgtcgccttcagtggctgctggtgcatcaaagccccctagcgtctggcagcccagaaataatgaagagcaagggtggcatctgagcaccaaggcaggcgacagcacagacacccatcgccttgcgtcccaggtgcgggctctctgacttgccctttgacaggggcagaggcccctcaatgtgggatgctgtcattgctggggttcccaaaggggaagggagaggcaccaaggacaagctgagccgcaacgctcccttctccagtcccggcagctaccaaggaccttgaataaaggtgggttatgaaatgttgaacacaagcaaacccagatcagagaggaggaggtgcctgagtgattcccgcccgccaagcaggtcctcccaagctggcctctggctgtgctcccagctcccaggcacacaagctccggtcaggccagcctcccatcctccctgccctctgccctaacctcactcatactcccacagcaccaggtcagctcctctgggagctggaaggaactgagatgaacacaccagctctttttttcacatatttggagaaaacagccatgggaggacagttaagagggtggcagctctccaacacacctagtttgccaacatccttcctaaatgtagtgcccagagatggtcatgaaccttgaggagaaactaccgtggtagcacagcaaaggggctaagtgagaaggctctggaatcacacagaactgggtttgaatgccacttctcccacttactgtggggctgggcaaataagtcaacttctctaagcccccaagtttctctacctccacggggattttgtaaggactaaatccataccatccatcagcaggttgagcctggcccaggccagggtctgagtcagagcgagcacttaataaccagcatctgctagtattaccggcactgcaacagcctcctgctgtcactctcccccacaccagctgctgcagtcctttctagaaggcaaacaggagctcgccaggatgggcctcccttagcctcctcggagatcttcagtgcctcctccaggcccagcccttgctcaccagaccttccttgtctggcctcacctgccgcttccacctttatggtctaacgtggaactccctgtgttccatcttcctaaggcatgctccataataatccttgcctggagtgctgctccctgccagagagcaccccagaactcatgttcatccccccagggttggggcctctcccccaggaagccatttctgatccctctggatctcagttccctgtctttccaggcagaacctcccgtcacggtagatctctgttgcaccatccctgctgcctagagcaccctccccggccccactccccagcaagtcctgggattccttggggcccagctcactcctcaccaagagcctccccctggttcacgctgcttcctctgagctcagacagtcacaggaatgacatcatcgagcccctccttacagtaggtaattccactttattggtgtttgctgttcatcctgccttcccaatcaggtagcaaatgccttggggctgacttagctgctccctccaagcacacagtccaacagcccactaatccctgggccaaagggaccagacacccagagccacccaggaaaactatcaccaaaaacccagctcgtggccccacccccaaacacagcacttgaacttctccccttgtgaagaaaaagaaacacacacacaccctctctctcctcgcagcctctaaaataaaacatttttcacctaatcaatccagtccatcagccccggatgtttctccacaccaggcaattcgccatcatgttcttcaagttattttgctaaacattatccaacctcaaacaaggggcgtggcctagagcccttttcctgttccttcctctcttgtaaagatccctctccttcgtgtcttaccagcctctgccaggctcctaccacagtctcttcccatccccaggccctcctcccaaacccccttctccagccttctgcagatgttcccagtcccaccaccgtccccaggctctgcttctgagtggccaccacacactgttctctctacaagcccactagtcctttcccaggtctcctctcagtttccacaacctccccttgaccctttcgggtcgtcccatcagcacagatcccaccacctcccacaccaccgccccctgccaaactcccttctccttcctctgcccagagcctcatgctcctctcaaccctactaagtcttcgtggatcccttttctgttccctttcagctcctcttagcacactcatgtttctcagtctctccctctcctgacccctcccagacctctccgctcgggcgtccaccttgaacccccatcagctctctgcacgctccgaacctgtttccttctggaagtcacattaacaacagctaacactctcagagatgtaactccacgccaggctcaattctaacactcatagcaaatgggaggtaggtttgatttgtgatctcctttagcagggagactaaacaatttacccaaagtcatgaagtaagtggcagagctacttgggctcttggcacttctaagccactacaatttatcacaggatggtcgtgtcagcttttaggagctaacgtgagttttatgccacgtcatatgtgttagttctgtctcccaggccttttcccatccctcttctcagcatgtctctgtcatccctattactcgaggatcacacagcaggaatttgatcccccgttttggttctctcagtccccctgtctctccctgttatccctccatctccttggccaagccaccaccacgcattcccccacccaggagtctccagcctcaacccaggcctcctcaggcttttttctttctttctttctttttttttttttttttttttgagacagagtctcgctctgtcccccaggctgtagtgcagtggctcgatctcggctcactgcaacctctacctccgggttcaagtgattctcctgccccagcctcccgagtagctgggattacaggtacccgccaccaggcccagataacttttgtatttttagtagagacggggtttcaccatgttgtccaggctggtctcgaactccccgcctcagataatctgcccacctcggcctcccaaagtgctgagacctccacagtcttgactccatcatcccgggttcctccgttcagctgtccttaaactagtcactgctaaccagggccgtactcaccccatgcaccccccacacttcagacgcggctcaccgctcctaggatcatctagccctgagcccctctgcctggtgtcagcccccttcagccttcaccctcaccgcccagggcccacgcaaatccactgctccaggggttgaaaaggtcagtccctcgggcaggcgtcctcagccccaggccccatcactgccgcctgagagccttcaaacagactcccctagagctccgaaaagcctctggacctggcttctctcccggactccctccgtccccccaggccggtcccctccaaggcttcaggacgtactccctcggtccaggttctcccccgcccgctggcctgtcttcggcctgggtccccttcctcgcctcaagatagtgtcgcctcggtccgtgtgtcctcagcccaaatcccttccgccatgtcagaccgtctctcctcaaaccgtgttgccccggcccaggctcttggccctcagcctgcgtcccctctgccgcctcaggccatgtcaccttattgcaggttcctctccgtcccctcggcccgagctctgcgtgccctaacccgccacctccgagcgtgactccttcgtcctctcagcctaggtcccggccgacccctcagcccggttctcacccaaagaggccagagaagaaggactgcgagttcttcactttgcgctccgcctcggccaacagcgccatcgcctccgcttccttcccggaattgtccatggcggccacaaagggactcagcaaagcgcctgaccctgaccctgggaagactcagccgcggccgggccgcggaacacagatcggtaaaactcgcccggctgcgttgacgtcgcaccggcgcgcgtcgcttgcggccaggaaccacgtgactagcgctggccaaccagcggcctcgtaacgccgcgcccgctccgccggacacgcccccaccagccgccgcacgccgcccgtgactcgtgaccccccaatcggcgtcaagagacctcaacgcatgcgcacataccggcgaacggcgctccactctctccccagcgctctgtacctcacctcccacgtgaccctgtggaaggcaatggcagtaccccccgccgaggccccgccccacggtgttgctgctggatcctcctccaccaatcagcaggagccctcggctcgcgctggggcggggggtcccccactcgccctccccgcggaactctggcacagtcagctgaccgcagacactcacgtgacagctcggggcccacgcccgggtttgacagttctgcgcagaacttagtcccgcccccgcggctggtctcgccggtttcttcacttggaaaggcgtttgtgggaaaaggaaaccgttctgctttttcttgctccctctgtcggccagtactagaactgctttggggagaccggtgaagagagactgcaaacaaaaacttaagaggttctctaactctggtttcataaaaaatagctgaagagggccgggcacggtggcttacgcctgtaatcccagcactttgggaggccgaggcgggcggatcacttgaggtcatgagtttgagaccagcccggccaacatggcgaaaccccgctctactaaaatacaaatattaaccgggtgtggtggcacactcctgtaatcccagctactgaggaggctgagagaggagaatcgcttgaaccggggaggtggaggttgcaacgggccgagatcgtgccactgcactccagcctgggcgacagagtgagacttagtctcagaaaaaaaaaaaaaatagctgaagagagcgtgttaaaaaaaaattcagattcgaagatgggcgcggtgtctcgtgcctataatcccagctactcgggaggcgagaggatcgcttgggcccaggagtttgagtctagttcaagtcccgccttgggcaacatagcaagactctgtctctaaaaaaaaaagtttaggctcaaacacacctcctgctgtcccagaaaattgagttgctggtttctgagacagggtctcactctttgggttgttggttttggagacagggtctcggtctgtcgcccaggctggagtgcagcagcacaatcatagctcacctcagtataactttgtagtgccagaaaggaaggaagtattccacacgtgtgctcacacacaaaattagggggtatgccaaaggagccaactgaaagaactcccaatggccaaagctggaacaatttgagcatcaaaataaagtagtattggattataatcccaaacataaagtatccatgagcctatggtcatatagatgaatatagaacaaataaataaaggggggagaatagacaaatagtttgtgcagaagaattccaaataatctgcgtagatactctgctctcaagaaggtgaaggatacctccccattctgtaagtatggactgtgcatagtgacttcctttcaaagaagagggtacaagaaaggggagaaaaagcctaaatttacagtggagaaacctgacattgacatctaggtgattgaggttaacctcaacattgataagtcatgtgattaaaatggctctttacttctgggatctttcaatctaatcatgaaaaaaacactagacaaattccagttgagccacatcctccaaaatacttgcccagtactcctcaacactgttggtgggtgcagtgtgtcacatctgtagtcctggtactttgggaggccaaggcaggaggatcacttgaggccaggagtttgagaccagcctgtccaacatggggaaaccccgtcgctactgaaaatacaaaaaacttagcccggtgaggtggtgcatgcctgtaatcacagctacttgggaggctgaggcaggaggatcacttgtaccctggaggtggaggttgcagtgagcggagattgcctcactgcactccagcctgggggacaagagggagactccgtctcaaacaaataacactgtcaagtcatcaaaacaaggaaagcctgagaaaccatcacagccaaggagacgtgactgctaaatgtaatgtcttaccttcggtgggatcctggaacagaagggcattgagttaaaaaaccaaggaaattggccgggtgcggtggctcatacctgtaatcccaccactttgagaggctgaggcgggtggatcacctgaggtcaggagttccagaccagcctggctaacatggagaaacactgtctctactaaaaatacaaacattagctgggcctggtggagggcgcctatagtcccagctactcaggaagctgaagcagaattgcttgaacccaggaggtggaggttgtggtgagccgagattgtgccactgtgctacagcctgggtgacagagtgagactccatctcaaaacaaacaaaaacactaaggaaatctaaataaactatgaagtttagttaataatattgtgccatactggttcatacgtggtaataaatgtaccattctaatataagatgttaatcataggggaaactggggtatgtgggaatttttttttgctgtcattgcagtttttctacaaatctaaaactatcctaaaaatcttctttaaataaaacagtttccaaggccgtacccacaatggttccaattctgagtctgtggtgggtcacaggaatctgcatttttaaaaaacagaaccctatataattaggatgcagccagacctggtggttcatgcctgtaatcccaacactctgggagaccaaggcgggaggaccgcttgagcctaggagttaaggaccaacctaggcaaaaagcaagatcctatctccacaaaattaaaaaaattttaattactccttgggaggctgaggtgggaggattgtttgaccccaggagtttgaggctgcagtgagctatgactgtgccactgcactccaaccgggacaacagagtgagaccctgtctcatctcaaaaaaaaaaaaaagtaaaattaggatgcagataatcccgggaccacagtttgagaaaccgctattatctagggggttggctgagccgagcaaggcataagaagccttcccccaactctcttcatacatgaatagacttgcctggaccacctacttgtggttgccactgtgtcctgaccacagagcaggtgggggtgagcctggattaccacaagcggttttggttccatgtctgtcaaagcaacactatgtaaaagcttctgtttaagctgttccatttcagggtaatttgtcatgcagcaacagataatataacccctcagccttttcaaccagggaatttttttccatttccagagttcattggatttatttaggatgggatccaaacaatattagcaatcacatgagagcttgttaactagtagccattcagttcttatggtgcaccctcccaagtgcttaatttacattttatttctatttatttatttattttgacatggagtcttgctctgttgcccaggctggagtgcagtggcacgatctctgctcactgcaacctctgcctctggattcaagcaattcttgtgccttagccacccaagtagctgggattacagtcatgtaccaccacacctggctaattttgtattttatatttttagtagagatggggtttcaccatgttggccaggctggtctcgagctcctgacctcaagtgatccgcccaccttggacttccaaagtgctggcattacaggcgtaagccaccacgcctggccataatttacattttatttaactgataggttgcgggggttgaggaggggcaattttcatcccattttacagattgagaaaactgaggctcccacagggaaagtgattcgccctagtttacaaggaggtaagaggagccaggatggaattgaggttcatctcacacctgaaccctttcccttaactgcagtgttccaactgcttcaaactcagcgtccacctctgccccactcccagccaatctttaagccttagctgataggtgggccctctgtgaaaccttctcacgctgccgtctactttcccagctcttcagaacacggctcaccctatcatagacacgatcacaccctgatgcaatcaatcctctgcagtcaattccccatctgagctaatggcatcaactacagctgctcaggctcaaacctgccctgctggccttgatctgtcctttccttgaccacctcccactgatgtgtgagccactgacaactctgtcgcccaggctggagtgcagtggcgcgatcttggcccactgcaacctccacctcccaggttcaagtgattctcctgcctcagcctcctgagtaactgggactacaggtgttcaccatcatgcctggctaatttttttgcatttttagtagagacggagtttcaccatgttggccaggctggtctcaaactcctgacctcaaatgatccacctaccttgacctcccaaagtgctgggattacaggtgtgagccactgcggagcctacctttcttttctttctttctttctgatggagtcttcctctaccaggccgaaatgcagtgacgcaatctcggttcactgcaatctccacctcccaggttcaagcgattttcctacctcagcctcccaagtcactgggattatagtcatgtggcaccacacccagctaatttttgtatttttaggagaaatggggtttcaccatgttggccacaatggtcttgatctcttgacctcatgatccgcccgccttggcctcccaaagtgctgggattagtggagagagccactgcacctggccatggagctgcatcttgagtggtctaggctaactgtggtcatttcccttctcactaacagggatcagtttagaagcgaacacaggctcaatgagacatacgggcatctgctgggagctgttaaaagttttcctcactcttaaaaagggaggcagggaggggggctgttttctcttctttcccccgccgcccgccccctgccggtctggattttggttcgaggttattctcgcctctgctggagccctcgttctgcccctgcccctgcccctgccaggggtccctgatttcaaggctgagcccctactgggacagccaaactccatgattgtttaaatcaacaccaactcttctgttacagtcaaaagcatttccagtaccatgacctaaaatcaccttgtttgcttattactgctaccttcctgctcctacaagagaaggtccgtgaggaaaagggcctctcttgcttcactatccctgttgtacggattggcaacgtccagtgcattctacagcaggtgcttcgtagatgtttgctgaatgaatgtccaaatcaacatgcccgtgttctccccaaggcccccagcccccagggcaggccacagctgactcacctcctgcccttagcacgtggtggggttcctaagcctttattggatcaataggcagggaagtcaaagacagcagctcaagaacccaatttaatcagatttacgagttgacatgtacaaaaaacaccgaacaatgcagaattcatcgcaagactagggactgaatctggaaggtagagtccccgccccagggaggggcccagcgtgttggagatctcaaggttttttcccactgattctctaagtcttggccttatctaacacatgaaaccaaaccccacaactgaggctaagatttaagagctacccagagctaaattttcccctccccaagcctccctgctctagaagtggaagggaaagaaggggagagactatgaacctaaggagagtggagcctccagcaccaccggacagggactgcatagctgtccgacaactgagctcctcctgcctatctgtggccaaatgccctccatgtttgcaggcaggttggccaacaggggacagggagggtggggggaggcagaggggtgccccaaacgccctggagaggccgaagggaggaggggcagcactggaggccccattcggacttgctgccacgggagtcaccactgcagggggccgatgtcagctcccagctcctcttcctttagctggaagggcttcactggccacttcaccctgatgatgggctccacgtggtcctgaaggcggtgccgcttcatatgggcatttcgactcttgatcttgtcaaacaccctgaggagtcaccagaggacatggggtcagagcagggaggaagggatcacaggggctgaggctgggagccctgggagtgtttccaggagaaagctgggtacctttcacactctctgcatggaaaaatgccctggctctctgcacttcccaacagctcgggggtccgcttggagcctgcatttgggctggagctgaggatggactccctcctataactcttggtctttaacttgggagttggatggtggctgggtctctcccgagggctgcatgggacctgcagagggagcaaaagtgacataagggtgctgacctgtcctgctgtaagagagacacagagctgggggcatacgtgtctcctgcaggaaaacccttccatcaggagcacccccgccctctgaccccaccgtccaactcaacgggtagcaggcactgggaggagagaagagctcccgacacagccctggttcctctaccttttcctctgtcctttccacttcctccggctctctcttgaccctcttttctagccctggggctcggccacagtcaaacttgatcatttttttccagatgtaataatactcaacgcactgagctaccgtctttgtctggatctagtgaaagaaaacaagcaggctgtggctgtgccacgcgggccctgggagtgtgaccttgccattgggccggccgcctcctttggaaagccctccggaagcacctcttcctttggcttggcgttaccactcaccacaaaggcacaggaccacaaaatccttcctggggacgagggcgttcaaactggagccacatagtagccaccagtacctaagcctgcacactctgagcagccattccagctcaggaattctttcctaaggaagatgggcacaaaggttgcaccagggatgccaactgtgacatcatgctaataaatcggaatgctctctgcaggcagaataccacacagacattacaacagctaggcagagcctctaaagtcttggcaggaagtgacccactctagaagaaggggaggttttgagtgcacagtgtgaacctaggggattattttcccgttcctccactaagaaaggatcccactaaaaataacttctgttaaaaacaaaagggaagctgggcttggtggctcacgcctgtaatcccagcactttgagaggctgaggcaggaggacgacttgaggtcaggagttcaagaccagcctgggcaacatagcaagaccccatctctacagaatttttaaaaaattagccagtcatggtggtgcatgcctgtggtcccagctacttaagatgctgaggcgagatgatcgcttgagcccaggtgttcaaggctgcagtgagccttttttttttttttttttttgagacagaatctcgctctgtcgcccaggctggagtgcaatggcacgatcttggctcactgcaacctccgcctcccgggtccaagtgattctcctgcctcagcctcctgagtagctgggattataggtaccctccatcatgcccacctaatttttgtatctttgtagagacagggtttcaccatgttggccaggctggtcttgaactcctgacctcaggtgatctgcctgccccgacctcccaaagtgctgggattacaggcctgaaccaccgcacccggccagcagtgagctatgatagtgtcacggtactccagagcgagtatcttttttttttttcactgcaacctccacctcccaggttcaagcaattcctctgcctcagcctcccgagtagctgggactataggcgcgcaccaccatgcccagctatttttttgtgtttttagtagagacggggtttcaccttattggccaggctggtctcgaactcctgaccttgtgatctacctgcctcagcctcctaaagtgctggcattacaggcgtgagccaccgcgcccggcgagcgtctcttttaaaaaaaaaaaaaaaaaaaaaaaggaaaagtttaattgctctaggaagaaaatttcttgggaaattaaatcggctattgagcgaactccagaaaagacattctccacccaaatgtttttcagctttgtgagtattcacaaacgaggagtcaaaacagcacaaactctgcctaagagacatcactaagtttaaaaaaaagttggacttctgcttctgaacaagatggagcaacagaaccagatttaccctctcgtccaaaacaatgaaaacacagagtcaaaatataaacaatgtttggcaagacaccaggcgtcattcaacaaagggcagtgaaccctgacaggaagcaagctgccaccgctccagcttatcaacttgtgtttccaggccaccacccaggcaggggcaatttaggcagaacccagcaggacttagggagctgaggtggagcacagtgcctccggagaccacggcggtagagcccacaggacagaggatgggagaggagagagctacacacagaacattccagagatggggagcaaatttcccccaagaactcacccaaagactgcccagcacatgcatgggaagagaccagccaaagctgggcaaagagccatccaaaaggatgagaggggaaagtgtgtgctgctcctacagggccaggaagagtgcccgttcccacagccagagtgggaaattttatgatgcagggggcactgggtagggcagtgacacagtcttgcctcagtaaggagaaataatcagccttagagaagagctatgctggtcccatctaaaaaatctaaaactgaacctaaaagtaactgtgtcccagaacaaaactcaagaatatttacaaggctgcaaaaatatccagcatccaacagctaacattcacaatgcccgtgatctggtgaaaatcaccatgcacgcaaagacgcaggataacacggcacatcaggaggagaaaacccaatgtatcaaagtcaacccaccagagacacaggtgttagaatgagcagggaaggacatgaaaggttaccataactgtttaatatatgttcaaagagttatgccagaggccaggcgcggtggctcacttgaaatcccagcactttgggaggccgaggcaggaggatcacctgaggtcaggagtttgagaccaccctggccaacatggggaaaccccatctctactaaaaatacaaaaaatttagccgggtgtggtggcacgcacctgtaatcccagctactcaggaggctgaggcagcagaatcgcttgaacccaggaggtggaggttacagtgagctgagatcgtaccactgcactccagactgggtgacatagcgagactctgtctaaaaaaaaaaaaaaaaaaagagttataccagagctaggtgtgattgcacacacctgtagtcccagctactcaaagttggaggatcacttgagcccaggaggtcaaagggtgcagtgaactatgatcacacccctgtactccagcttgggcgacagagtgagatcctagatcttaaaagaaataagaaccagtaaaaccttcaaaacactgctaagagaaattaaagatgatgcatagagacacagcccctgttcatgagtcagaaactgaatgttgttagaatgtcaactctccttggctgggtgcggtggctcacgcctgtaatcccagcactttgggaggctgaggcaggtagatcacctgaggtcaggagttcaagatcagcctggccaacatggtgaaaccctgtctctactaaaaatacaaaaattagccaggtgtggttgtgcgcacctgtaatcccagctactcgggaggctgaggtacgagaatcgcttgaacccgggaggtggacgttgcagtgagtgaagagcgcgccactgcactccagcctgggcaacgagagtgaaactctgtctccaaaaaaaaaaaaaagtcaactctcctcaattggcctatagagccaatgcagtaccaatcaaaatcctagcaggttttttgttttgttttgttttgttttttttggtaaaaatggataagctacttagaaagttcatatggtaatacatgatcttaagacttagaaagctacagtagtaaaaacagtatggtattacatttttttgtcttttcaacaaaaggtacaaatgaatatccacatgcaaaaaatgaactttaactcatactttacaccatatacaaaaattaacacaaactgaattgtaaacctaattgtaaaacctaaaactataaaacttctagagaaggccgggcaaggtggctcacgcctgtaatcccagcactttgggaggccgaggcgggcagatcacgaggtcaggagatagagaccatcctggttaacacggtgaaaccccgtctctactaaaaatacaaaaaattaggcgggcatggtggtggcatgtgcctgtagtcgcagctactcgggaggctgaggcaggagaatggcatgaacctggaaggcgtagcttgcagtgagccaagatctcgccactgcactccagtctgggcgacagagcgagactccgtctcacaaaaaaaaaaaaaaaaaaaaaaaacttctagagaaaacaaggggaaaatctttgtggttgggttaggcaaagaattcttagatacaacaccaaaagcacagtccataaaagaaaaattaataaatgacttcatcaaaatgacaaaatttttctttaaaagacattgttaagagattaaaaagctacagattgggagaaaacattcacaaagcatggatctggataaatgacgtgtcctgaatcaataaagaactgctgtaactcaataataaaaacacagccggctgggcgcggtggctcacgcctgtaatcccagcactttgggaggccaaggtgggcagatcacctgaggttgggagttcgagaccagcctggtcaacatagcaaaaccccgtccctactaaaaatacaaaaattagccaggcgtggtagcaggcgcctgtaatcccagctactcaggaagctaaggcaggagcatcgcttgaacctgggaggcagaggttgcagtgagcatggattgcgccactgcattccagcctgggcaacagagtgagactccatctcaaaaaaaaaaaaaaaaaaagaaaacacagacatctcaataaaaacatatgcaagagatatgaacagacacctcaccaaataaggcatacagacagcaaacaggcccatgaaaagatgctcagcatcgtcagttgtgaaggaaacacaatgcgatgccaccacactgtcatgagaatggctggaattaaaaggactggccctacccagggctagcgagtttgtggagcaactagaaatctcttttcctgccggtaggaatgtgaaatgatacaactactttggaaaattgtttggcggtttcttaaaaagttaagcatacacctactaagtcattccattcctggtatttactcctctagaaaacaaagtacatgtccataccaagactggtacctgaatgttcataacgaatttatttatagtcatcccaaactggaaaccactcaaatgtccaccaacaggcaaatgattctttaaaccgtggtacatccacccagtggaatactattcagcagtgaaaaggggagacctatcaatacctggaacatggatgaactcaaaatcatgatgctgagtgtgagaaagctggaccaagtagagtccatactgtgtgactactccatttatagcaaactctaggaaatgaaaacgaatttacagtgccctggcagatcagtgctgactgaggacagggggtgcaatggggagtgattactatgtggcaggaggagattcagggctgagggacatgctcattatcttgactgtggtgatggtttcccaggtatagtatcaatatgtcaaaacttagcaaatcttattatactgcaattatgtgcaattttgtatacatccaattttttttttagaacagaaaataagcagcaggacattatatgcagtgagatctcatcctttggcttttttcggggtggtgagagtctcatcttgtcacccaggctggagtgcagtggtgcaatcttggctcattgcagccttcacctcctatgctcaagcaatcctcccacctcagcctcccgagtagctgggaccacaagcacgcggcaccatgctaggctagtttttaacttttttgtagagacaaggtctcactatattgcccaggctggtcttgaactcctagcctcaagcaatcctcccaccttggcctcccaaagtgctaggattacaggcgtgagccactgcgcctgacctcatcctttttttctttttttgagacggagtttcactcttgttgtccaggctggagtgcagtggcgagatcttggctcaccgcaacctccgcttcccgggttcaagcgattctcctgtctcagcctcccgagtagctgggattacaggcatgtgccaccatgcccagctaattttgtatttttagtagagacagggtttctccatgttggtcaggctggtctcgaactcccaacctcaggtgatccacatgcctcggcctcccaaagtgctgggattacaggcataaaccaccacgccaggccctttttttttttttttttttgagacagagtcctgggccgggcgccgtggctcacgcctgtaatcccagcactttgggaggctgaggcaggtggatcacctgaggtcgggggttcgagactagcctgaccaacatggagaaaccccatctctactaaaaaatacaaaattagctgggcatggtggcgcatgcctgtaatcccagctactcggaaggctgaggcaggagaatcgcttgaacccgggaggcggaggttgcggtgagccaagattgcgccactgcactccaccctgagcaacaagagcaaaactccgtctcaaaaaaaaaaaaaaaaaaaagagacagagtcctactctgttgcccagcctggagtgcagtggcacaatccccactcactgcaactctgcctcccgggttcaaacgattctcatgcctcagcctcctaactagttgggattacaggcactcaccaccatgcccggctaatttttgtatttttagtagagacagggtttcaccatgttggccaggctggtcttgaactcctgatctcaagtgatcctcccgcctttggcctcccaaagtgttgggattacaggcgtaagccaccatggccggcccttatcttttttaaagtacatgcatacctatatatataaaatttgtacagacagaaatgcctgttgcttggtggaataggtaacagaggttgccaagcagaagtaggactgcggggaggggcatggaagactgttctgtgcaggtgatgcaggtctgtaccatctggagctgttcatgaggatagctttttgacattgtaaactgtctacagtaagagtgctgccacaggcaggtgagggtggggccctccgacccccgaccagccctgcagctctagcttgtctcagctgtgtgaggcagggccttggacaccagcccacattcactttaccatcttgtgtatcaagtagaagtccttcttgtgggcatagaacgccttcttaaaaagcctcttctctataggggtccagacgtctgaacctatcaaagaacacagccaacagggggaaggccatttgtcctgggaccacagccatggctgaaatgcagaccaccttcccatttatagctgccattactgagtaccaattatgtgccaatctcataaaaaactcaaaaagtctccagaagggagggaccactactagccccacttaacagatgtggcaactgaggcttcagtcgcttgctaaaggcaggtgggggccctggcatcctgtttccagagctgatgggttcaaccactgaacctaagcccatcttccctccccctggccatgatcattccccttccagctgggcagagtccgtaaggaaaccactgggaaagggcgaagcaggatcccactagcagaatgtggcgcccactgagtcatcccgacaaggacaggccctcctgaaaggcaggcaaaggtcccgaggagaactccaggaggcaggggcagagcttgcaacagagctggccgattcataggggtctcagctgggccaaaccagctcagcagcctttccccgtcacctgtgtagcgatagtcagcgagcaggtgtgtccgtggcttgtggggccctcggagcagaagagtctccagggcgacctggaacaagaggagcgacaggctgcccaggaccaggtgggggaagaggaccacaggcatcctcccattcatctgaaaaacacttgcggctgtccctgaagacactgcctgtcccagggctattcaaagttgccctggatgggccaccagcctgtgaactgtctgtgcgtgcatcaaccgtgtcaccaggcacaccactgaatgcagctgaagttattttttcacagcaagcctatcctgacgaaggagactgtgtgtggatttattctggcacaagctccttactccctcagggactggcattttgaggagtatgacccttgcgtagggccccatttttattttcttcatagcactagtcaatagctaacaattgaaaacattttatttttaaagatgaggtctcactatgttgtccaggctgagctccaatttctgggctccttcagcctctgcctcccaagtagccaggaatacaggtgggtaccactgtacccagctagctaacaattttctttgttttttcttttttttgagacagagtcttgctctgtcacccaggctggagtgcagtggcatgatcttggctcactgcagcctccacctccccagttcaagtgattctcctgcctcagcctcccaactagctgggactacaggtatctgccaccactccctgctaattttttttttttttttttttgtatttttagtagagacgggattttaccatgttagccaggctggtctcgaactcacgacctcaggtgatccacccccgccttggcctcccaaagtgctgggattacaggcgtgagccatgcgcctggcctagctaacaatttgactttcctaaaatgtaagccccctgagggcagggattttatctcaatcacaagtgtaagccatcattgcagggtttgcataatttgtggggcccactgcaaaatgaagatgcaggactccttgtttaaaaagtattaagaatttcttttctttttttttcttttttgagacggagtctcactctgttgcccaggctggagtgcagtggtgcgatctcggctcactgcaactgcactccacctcccaggttcaagcaattctcctgcctcagcttcccaagtagctgggattacaggcgcccaccaccatgcctggctaatttttttatttttagtagagatggggttttaccatgttgtccaggctggtctcgaactcctgagctcaggtgatccacccgtctcggcctcccaaagtgctgggattacaggcgtgagccaccgcgcctggccaagaatttcaagacagagacagcagagcattaaaccaagcgtggagcccctcagctggccctggccccagtgcctacagtacaggcaaccagcaggtacccaataaatatgtactgccactctgctgaggacctgctatatgccagacactgcctctcaggttggtgaaaagcaagaccatggcatgactcttagatccttaacacaggcaatgtggctcttcctctcccgctcctcacagttagacttttaatatactttctaacacccagaattgtgagcgggggggggggggggggtccttggagtaggtagaggcatttatgttgcatcagaggtttgtatatataagttttcaattgaaagctaaaactcaaggaattaagtagatgaatgcagggcctgagctgggtctttggggcttcccttctccagtgccccctgagatctcagaggaacccctgcgcttgattgttgccccagacaagtagctatgaattgggcccacgtcttagcattcccctacagtccgtgcacaaggaccactgcaatcccaaagccgctgtggaggaggatgggcggccttcttccagcttccatccgctctgaacccccaagcagacagcacgtcacatgcacctagaaccctgggccccaggaaagcagggagggtccccttgctgttcctcacctgaacgttgccctgagcctcgtgcaggcagtgcagagcgagctccaggttggtgccccctcctggcatcacgctggagcatgccacattgcagagctcggtcactgtttccaagaaggacatgaggaagaggaggcacacaggagtcatcaggtgctagggaggaacctttcccgaaagacagcagagagggggtgccttccccttctctctcctgcatctcagggagggacaaggaggaagagcagaaccctgtccccagcacccactcctgatggcctgaccagccaccatgtgacaaaagaggtaggggagggagagtgcagcagggaagaagcaacgctggccaagagccagctccctcccacgcccaggggacactacttggatctagcggtcaggagttccagacctaggaggaaaaacaccctggaaatggagggggaagaagggcccttaggaatttagccccaaagcctcagccacctctatcctgtgtctctgagctgatcatcatatctccccatggcttccagaccagagaagctacatgctcgtcagttccagccagggatctctcctggagttccgggatctctgcctgaaaccggcttcctatattgatatgtctgaaatgaggccacacacagataagggagacgtacaaacatgactgagatgggaagtgaaatggagacgctctgtatgccctgctcttgggccacagcctgctccatggaaaccctctgctgtctcaggtgcatcaggtacgtgctgttcccgacagatgcacacagacatttcagaaacttctgcagggacacttcctcccttcctctgttttccttcattgccacatttctctctcagggtcaaggcaggggaggtacaagctgacacccggcatgtgtctacgtccacaccacagccatccagccacatccctcaggcatgcttgagtcccactctgtgccatcaccaattctacctggaaccccaaggtccagggcattctgtccccatgtgccacatatatatttctagaaggaataatttggggggattttcatatatatatatatatttgtagaaggaataatattgggggatcttcctacatatatttggaaaaatctaccgcttcacgcctagggagcctatgtgagtaaacctgaaccccaccatgggaagaaggaacccttgggaaaagtgacactagaactcaaggtggggtaaaagcagcttcactggaaaggacccaacttacggctcaatgctgattttggtgtcatccttcaccacacagatgccaaaggacccatccacttgatctagaaagcacagagtgaaaaggctcaagaagacagacagcaggtaaccgacagggtcctctgcctgcctgtgtggacgcagctgaaagcagggtctttaagatcccatgggttggccgggcacagtggttcacgcctgtaatcccagcactttgggaggctgaggtgggaggatcacgaggtcaggagatcaagaccatcctggctaacacacagtgaaaccctgttcctacttaaaatacaaaaaaaagtagccgggcgtggtagtgggtgcctgtagtcccagctgagacagaagaatggcgtgaacccaggaggcggagcttgcggtgagccgagatcgcgccactgcactccagcctgggcgacagagcgagactccatctcaaaaaaaaaaaaaaaaaaaaaaaaaaaaaaaaaaaaatcccatgggaaagggcagcacttcagaaaaggtagaggaaggaactctaacaaattaactcatgacaagtatacgtatatataaaaacagcacactaaagtctctggaaattgtcctaaggtcattcagcacttggagaaatattcattaaaaaaaatcaactaggccgggtggggtggctcacgcctgtaatcccagcactttgggacactgaggtgggcggatcacttgaggtcaggagttcaagaccagcctggccaacatggcaaaaccccatctctactgaaaatacaaaaattggctgggcgtggtggaatgtgcctgtaatcccagctacttgggaggctgaggcaggaatcacttgaacctgggaggcagagtgagccgagactgtgccactgtgctccagcctgggcaacagagtgagattccatctcaaaaaaataaaaaataaaaaataatcaactgaatattggtaagaacaagaggctgttgcatctgagctgtgacctgctcccttacccagccagctcccagctccaagggttctattccaggtaggtgcagcccagacaggggctgcctctcctgtcagctcccatgcttaaagaattaaaggaaggtataatgacaatttctcatcatagacagaatatcattaagaggtagaaattattaaaaagagagaaccaaatgggaattctggggttagaaagtaaaatattggcaagtgaagctgttgaggaaaataataaaataaccaaaatggggctcaataggtttgagttgacaggaagaaaataatctgtaaacttgaagacagatcagtagagactatggaatccgaagaacaaagagaaaaataaagagagcctcagagaaatgtgggataccattaagtacagcagctacatgtaacaggagtaccagatggaaaggagaaagagacagaaagaaatatctaaagaaaaaggcctgatgcagtggctcacgcctgtaatcccagcactttgggaggccgaggcgggcggatcacctgaagtcaggagttcaagaccagcctggctaacataacaaaaccccgtctctactaaaaatacaaaaattagcctggtgtggtggtgtacccctgtaatcccagctactcgggaggctgaagtgggaggctaacttgggagttagaggctgcagtgagccgagatcatgccactgcactccagctggggtgacacagcaagactctgtctcaaaaaaaaacccctccaaaccacccccccaaaacaaaaaaacaaaagttaaaagctacagtaatcaaaacagtgtgatactggcataaggataagtatacagatcaatagaattgaacacccagaaatacacccacacgtttatggtcaattgatttctaacaatgaattgtgctgagtcaattcaatgggaagtcttcaaaaaatgctgctggaagaactgcatatacacatgcaaaaaaatgaatttggacctttacctcatgtaatatataaaagttatcttcaaattgattacagacctaacctaagagtcaaaattacaaagctcttttttttttttttctgttgcccaggctggagtgcagtggtgccatcctggctcactgcaacctccgcctcctgggttcaagcgattctctgtctcagcctcctgagtagctgggattacagtgcctgccaccacacccggctaattcttttgtatttttagtagagacgggatttcaccatgttggccaggctggtcttgagctcctgacctcgtgatccgcctgcctcggcttcccaaagtgctggcattacaggcgtgagccaccgcacctggaccaaaattacaaaactcttacagggaaacaagagtgactctgcatgacttgggtcaggcaaatcttcacatataacaccacaagaacaagtaacaaaagaaaggaaattgggcttcatgaaaattagaaatgtttgtcctgcaaaaggaccactttacacctactaggatggttatacttaaaaagatagacaataacaagtgttgacaagaaggaggagaaatgaaaatgttcatatactgctactggaaatttaaagtggcccagccattttggaaaacaatccggcagtttgtaaacagttaaatatggagttaccatatgacccagcactacactcctagttatctacccaagagagctgagaacataaatccacacaaaaacctgtacataaggctgggtgtggtggctcaggcctctaatcccagcactttggaaggccaatgcaggaggactgtttcaccccagagttgtttttttttttttgagaccaaatttagctctttcgcccaggctaaagtgaaatggcatggtctcggcttactgcaacctccgctgccgagaccagctcggtcggggagaccctaacccagcggcgctagaggaattaaagacacacacagaaatatagaggagtggagtgggaaatcaggggtctcacagctttcagagctaagagccctgaacagagatttacccacatatttattgacagcaagccagtgataagcattgtttctatagattatagatcaattaaaagtattccttacaggaaacaaagggatgggccaaaatatagggatatgtctggctagttatctgcagcaggtgcatgtccttaaggcacagatcgctcatgctattgtttgtggtttaagaacgcctttaagcagttttctgccctgggtcggccaggtgttccttgccctcattccggtaaatccacaaccttccagcgtgggtgtcatggccattatgaacatgtcacagtgctgcagagattttgtttatggccagttttggggccagtttatggccagattttggggggcctgttcccaacactgcaccctcagttcaagcgattctcctgcctcagcctcctgagtggccaggattataggcacccgccaccatgctcgtctaatttttatatttttagtagagacgaggttttgccatgttggccagcctggtcttgaactcctgaccttaggtgatccacccgccccagcctcccaaagtgctaggattacaggcatgagccaccatgcctggcccacctcagagtttgagaccagtctgggcaacatggcaagacccccctccctacataaaaacaattacaaaaaattagccaggcatgggggtgcatgcctgtaggcccagctactctgggccgaagcagaaggatcagttgagcccaggaggttgaagctgcagtgagctgtgatcatacaactgcactccagcctgggtgacaagagtgagaccttgtctcccaaaaaaaccccaaaaatttctatatgaatgtttatggcagcattattcataatagcccaaagtggaaacaacccaaatgtccatcaactgataaataaacaaaatggggcccatctgtacaagggaaaaatgttcggccataaaaaggaattgagcactgatatgcactacaatatgaagggactctgaaaacatgccaagtgaaataaactagacacaaaaggctgcatattgtatgattctacttacatgaaatgtcctgaataggcaaatccaaagagagaaggcagatgagtgggtgcccaggctgggggaagaagggactgtggggatatgggcggagtcactgctaatgagctctggcttcttctggggatgctaagcgtgctctaaaattaagactatgtgatagttgcacggccttgtgaatatcctaaaaatcactgcatactctaaatgggtgatttgcatggtatgtgaagtacagctcaataaatctgttaggaaaattacataggccaggccaggcacagtggctcacacctgtaatcccagcactttgggaggctgaggagggtggatcactggaagtcaggagctcgagaccagcctggccaacatggtgaaatcccatctctactaaaaatacaaaaattagccaggcatgatggcgcacgcctgtagtcccagctacttgggaggctgaggcaggagaactgcttgaacttgggagttggaggtttcagtcagccaagatcacgccactgcactctggcctgggtgatagagtgatactctgtctcaaaaaaaaaaaaaaaaaaaaggaaatgacacagactggacagggtggctcacacatttaatgccagtactttgggaggtcaaggcagcaaaatcacaagtccaggagctcgagaccagcctggacaacatagcaagaccccatctctaagaaaaataaaaaattagccaggtgtggtgatgcgcacctgtagtcccaactatttgggagtctgaggctggaggatctcttgagaccaggagatcgaggctgcagtgagctgtgatcaagccactgcactccagcctgggtgacagagcaagaccctgcctcaaaaaagaaaaagaaaatgacacagaagggcaggcagaagcatggtcaggctaaatggcctctacgttttctttcgggctgtaaaattctatgcactagaaggcacttagatcagtcctggggcacatctgaatagcaaaggaaccctcagactaggtacacccaggcaggagacaatcactgaacccaatgctacaaggtagagtggctgtggtccgcaggcaatccaccctgggatcacagagtgagtgccccagcctcactcaccgagcatggagctgatgagctggtcagggctggcctgagtggacgtggaacagagggtgttgaagtacaccccagagccctcccggatggggctgagcattgggggtggtgtgtagggggagcactggaataagcccttcaggaggcagtccaccaggaacatgggtgaccgcaggcggctctggtggcatcctgcagggccaggctccccagccgtggagggtgggggccgcttcttccgctttctctgctggctgctctccttgctgtctcgctcctccccgtctttctcttgtccctgaagaagtttagaaccacaggtggtcgcctgaagccacctactgcaccactccatctccaggatggaaagagagcaggaaaaggagaccggccagagacaggaaactaggaaatgcacgcccggcaaaggaggctggccacacctgagccagacctgacgtactgagcctggcgatgatccggctgcagccttctcctgcacccactgccccagcagagcccctgactctgtgtaagaatagcctcaatcattaagatgactggcccttaaaaagagagagatccccagagatacagtgtgacggtgaagaaagaaatgctgctccacccaaatgacaagcaccgaaatgacccagccactgactcaggggaccttcaggtccacggactgtgtccccgagtccagcaggagcttcttcagtagggggtcctccagtacaggctgcagagacaagccctacgagactgatcactcgtaactcaccatgctctctctcacttccacaaaatctcctctccgctctgccagccctactcctcctcatcctctaggtctcagatcccatacctcctcctccaggaagccctcccttacctcctcaggctgggtcaggagccccctgggaactctctgggctccctctgctcccagctctgcccactctgggttgtcactgtctggggacaggcctgtctcctccactggactaggagccctgggaggcagggcccaggctattgtggtcacctctgtgtccccagcaccacccagcacagggcctggcacagaggggctcagtgaatgctgaatgactgaattaacatgcaaaccaggttcttctggatcaagattttcttttttttttttttttttttgagacagagtctcactctgttacccaggctagagtgcagtgttgtgatctcagctcactgcaacctctccttcctgggttcaagtgattctcgggcctcagcctcccgagtagctgggtttacaggtgcctgccaccatgcccagctaatttttttgtatttttagtagacacagggtttcaccatgttgcccaggctggtctcgaatacctgagctcaggcaatccacccgcctcagcctcccaaagtgctgggattacaggcatgagccaccacatccagcctggagtcaaagattttctgtggtatctggtttgggtttttcctacggcttcccccagcagctgcgggcagtggcaggaaggaggcaggccgacaagcacccaccatggccatgctccctatgtgtcgggtcactggaaccacggggatcgattgggggaccaccaaaggggctgcagctgtggggtccaagggcttcttggttcctgggggactatgcctgtccccttctggcctcagcacctgtcttagcggcttgcaaaactctgtgccaaacacctaaacacagaagagaagagatggctctttaagagataaggtaggtggggaaaggaagagctgcttcagcaaaaaaagctgtcatagaaaacagcagtgagtctgtggcatggaccaagctggagagctgctgcagcccatggcaatggcctgcccctggagagccacacagcctgactccagcccccgacccagagtgacgtccccatcctgagataagtgacaccaatctcgtttactccccacaggcctgccagaaacccagtaaccaccaagccactggtcgtcccccttcacctgcggttcctgcttccctcgaggtgacggccactggtcgctgtgaaaacacatgtggctgctcagccctttctccgtataaaacatctggctgcagttcttgcagacaaaagtgctcctgggcttcgtccagtctgtgggactgccgttttgctggttactgtgggacatggcaggaaagaagagtgggagattaggactctgtccttgatcactgattttttgttgtttttttttcttttttgtctataactccaatccactgacttttttttttttttggagatggagtctcactctgttgcccagactggagtgcggtggcaccatctcggctcactgtaacctccacctcctgggttcaagtgattttcgtgcctcagcctcccaagtagctaagattacaggtgtgtgccaatatacgtggctaatttttatatttctagtagagacagagtttcaccatgttggccaggctggtctcgaattcctgacctcaaatgatccccctgcctcagcctcctgaagtgctgggattacaggcgtgagccaccgcgtccagcctgactactcttgataaaccctataaaatggaggctgtaccctaatcccattaggactgaaagcatcctccccactcacttgtccagggccggcacaggaaggccagaggactcctgccagggtgcatgcaggatcgggggcttcttaacttaccctctgcctgccacattctcttccttcaccggatgggggagcctgtagatgtttccaccctgaagatgaaaatgcatctgaaccaacacatccaaaatgaagaggcaagaagagctcaaattacagacttttagaagaaaacatcagagtaaatcttcatgaccttggattagacagtggtttcttagataagacaccaaagcaaaacagacaaattagacttcatcaaaatgtaaaacttttagccaggcgtggtggctcatgcctgtgatcccaggactttgggaggccgaggtgggaggattgcttcagcccaggagtttgagaccagcctgggcaacatggcaaaaccccatctctacaaaaaatacaaaaattggcctggcatactggcatgggcctgaggtcccagcgactcaggaggctgaggtgggagaatcacttgagccaggagttcaaggttgcagtgagccatgatcgtacaacttcactccagcctgagtgacagtgagaccctgtctcaaaaaaaaataaaaaataaaaaataaaaacttttgtcctgcaaatggtatcataaataaagtgaaaagacagaccacaaaatgaaagaatatttgcaagtcatgtgtcagataagggtcttgcatccagaatatatagagaactcaaaaaatagtaatctgattttaaaaaataagcaaaggacctgaacagacatttcttctagaaagatacacagatggccaataagaacacagaaaggtgttcaacgtcagcagccacggggaaatacaaatcaaaaccacaatgagatactgcttcacacccgccagggtagttataatttaaacaaaccacggacaataacaagtgttagtgaggacatggagaatgtggagccctcatacactgtgggtgggaagaggaaacaagcaaaacagcctagtagttcctcagacctaaaacagaactgctgtacgacctggcgattctactcctagaacataaatccccataaaaatttgtacatgggtgaatattcacagcagcaccatattcaaaatagccaaaaagtggaaacaacccaaatgtccatccactgatgaacagacaaataaaacgcggccttatccatccaacagaggatcactcagtcatggaaaggaatgcagctctgccgtttgccaccccacggatgagcctggaaaacgtcatgctgagtgaaggaagccagatacgaatgccacagagtgcatgattccactcatatgcaatgtccagaacagacacatccacagagacagaaaggagactcgtggctgccaggccctggggggagggcgagattgtgggtgacaactaagaaatgtggggttccttttggggagatgaaactgttctggcaaagagtggggatggttgcacgatcttgtgaatatactacaaattacccaacgctacactttaaaatggtgtattcaggccaggcaccatgactcatgcctgtaatctcagcactttgggaggccgaggcaagcacatcacctgaggtcaggaaagaccagcctggccaacacagtgacaccctggctctactaaaaatacaaaaattagctgggcatggtgatgtgtgcctgtaatcccagctacttggaaggcccaggcaggagaattgcttgaacttgggaggcagaggctgcagtaagccaagattgcaccactatactccagcctgggcaacagagtgagagactccgtctcaaaaataaatttggccaggcacagtggctcacacctgcaatctcagcactttgggaggctgaggcgggtggatcacgaggtcaggagttcaagaccagcctggccaagatggtgaaacctcgtctctactaaacacacaaaaattagccagatgtggtggcgcatgcctgtaatcccagctactcggaggctgaggcagagaactgcttgaacccaggaggcggaggttgcaatgagctgagatagcaccactgcattccagcctgggcgacagagtgagactccatcataaataaataaataaaataaatttaaaaaataaaataaagtggtggatttggctgggcatggtggctcatgcctgtaatcccaacactttaggaggccgagatgagaggattgcttgagcccaggggttcaagaccaggctgggcaacatagcgagaccccctccatctctaaaaaatatataaaaaataaaatggtgcattatttggcacctgaataataaagatgttaacaaaacaaaaatgaggtagctgtggtatgatgggaagctactcatcctcctgagtagctgggaccacaggcgtgcaccaccatgcccaactaattttttttaaattttggtagagacagggtttcgccatgttgcccaggttggacatggagtcaggagacctggatgagctctttggaccaggccctccaaacacaacatctggaggaaccagtgaataattatcaatgtgcttaagtgtggggcacgatgcaggtgcccacttgtgcttgtggaaaccaagactcacaatcagaaaacacatggccatttcaagcaggaatctttaaaggaaagagagcatctaccttcatatcctctgaagattctaaaaaggcaaatccaaagggaaacaagagaaaaaaaaaagcaaaaaaggctttgtgagataacagtgttttgaacaactctgggatatcctcatgttgatctttttttttttttttaagacagggtcttgctctgttgcccaggctggagtgcagagacacaatctcagctcactgaaacctccatcttccaggttcaagcgattctcccccacctcagcctctcgagtagctgggaccacaggcgtgtgccaccacgcccagctacttttttaaaattttggtagagactgggtttcgccatgttgcctaggctgatctcgaactcctgagctcaagcagtctccccacttcagcctcccatcccaaagggctgggattacaggcataagccacctcacctggcctcattctggtctttttttttttagtggggaaaaccacaatctttcggaaccttaattccttcctctgtaaaattgcatctggggactctctgaaatgaaataaaatgcctggacaactaacaaatgcaaaggaaactcactccactctggtcaggccacgtgagagagagctggtacctggattctgctgaatattgtcagcttggacttggagggatctgccgggggcccggccgatgagaaggaggccatggctacctggctcggagaagccgcacagcacatatccatcttcgccttctctttccggaagccggagaatcgcggggccctggggttgcccaagagccggtagcctccaccccgggagcaggctgggcccttttcaccttttgtgatccttgaagccgcgccattctcggctggggcctgcttccctggcagcgaggctcctggtggctcctccccacctaactgggtctgccgttggcctgtggaggggaagatgtcctccaggtccaaggtccctttagaggatcgcagctgcttggccagagaagagatgtctggattcctggaagggtccagagacggtgctgcaaggggcgttggaaccgcggccactttcagtcccccctttgcgtctcgtctcgtgctgccgggggaggcctctctgggaaccccgggtgtggtttttctcctgcgggctggggagccctctgcctcggggtttccagggccggcgtggagagagtccacagcaggagccagtggtgggggctgctgcggccacggcccctgcagcggcctcagggcggctggtttgccctcgggcgcagggagctgggaggagactgctgccacctgggcatgggagaagatccgctgggacttggtgatcatctggaacacctgcatctgctcgtggctcacaagaggttcctgcgacttgaggaagagctggcggaagagcggcgaggcatccgcagggagcccgcctgccttctgggcctcctggaggccgggctccccggggttctggcacaggaaggagtcgcagtcgaccttgaccttcttgggggcgcaggggtcatcttccccgctggccgacctggggtcgctcggggcctccgcggggaccctgaggagcgcggcagggaagggcagagcatcctccaggccaccgccggggccgggcggggactcctccgaggggcttccgctgctgggtcccgggccagactcggagccctcccgcgagggcacggccgagggcttgtggacaacaaacacgttgttgcctttgcttttgggacagcccggcaggttccggagccactggaagctgtggctcgatggctgggaactggcagggaccgtctggcctcggaagagaggcaggcaggcaggcacggagccgccttcgggccagcactccgcggtggaccgggcctggagcagcgcggtatctggctccggctctggcgggtcgggggcgccgttctcggcggccctggaattaggggctgtgaacacgtcagtggccggctctttctgtgggaggcaaggctcctcgggaagctcggtgtccagcgctgctggggccgcgtgggggccggctggggtgcaggacgaggaccccgatgaggcggggcagggacaggcagtgttcctcccttcgctgtctgaagcccccgccggggctgggccaggagaaggggtcttctggtggacgatgctactcacgatgcggcgcaggaggtcccggtggggcaggagggagccgggggacctggcctctgggggcaccagggaccgcaggctgctggggggcggctggccggccgactcgtgggcgtggggggagtccccgcaggcctcttcctccgggggggcttccttcaggatgcacaggccgtgatggacctcgtagtgccggcgcagagagcggtagtcgcagtagctcttgctgcagccctgctcgatgcacacgaagggctttgtcttctggtgggtgagcatgtgcccggtcctggagccagacacaagcaggggcgtcaccggggcacctgggaccgggctttctgctgtaggaccctggtggcccccaaaagtctgtggtacagttgcaccacaattcagaaattgtactcagcccccacgaggaaagaccacccagcaaaccctgcttcggtcaaagccatctggcaggggagttcctctcccctcacctttaagcaaaccccttacagaaaagtaaaaaaaaaaaaaaaaaccagcggggcacagtggctcatgcctgtaatcccagcactttgggaggccgaggtgagtggatcacttgaggtcaggagtttgagaccagcctggccaacatggtaaaacccgtctctactaaaaatacaaaaaatttagctgggtgtagtggcacatgccagtaatcccagctactggggaagctgaggcaagagaatcacttgtacccaggagatgaagtgcattgcagtgagccgagatcacaccactgcactccagcctgggtgacagagtgagactctatctcaataaacaaacaaacaaataaataaaattttaaaaaatacaaaaaaaaaaatccactgaggccagatcagatttccccagagtgggttcccaaggaacacaaagacctccagagttgctcctcaaggactttggcacagctaataaataagttttgaaaaaacaccattcactccttggaggttcacgatgcacagtagcaaatttaattaattaattttttgtttttgagacggagtcttgctctgtcacccaggctggagtgcaatggcacgatctcggctcactgcaactctgccccccaggttcaagcgattcttgtgcctcagcctccaagtagctgggactacaggtgcgtgccaccacgcccagctaatttttgtatttttagtagagacggggttttgccttgttggccaagctggtctcgaactcctgaccctcaagtgatctgcctgccttggcctcccaaagtgctgagattacaggcgtgagccactgtagccggcacacagtagcaaatgtaaaagccacacagagagagacctgtttaactttcagtgtctctcaaacttatttgcccagagaactgtttttggttttgttttcaaaaagcccctattagcattcctgagaaccagaattctgcagaatagactggaggagatgctaacttggggacgatccttcctttaacaaaggaatctgtgccttaccgtaggagacccctaagaagatgctacctggaaccccccacagcaaagaagccaatttacagaggcccaatccatagaaacattatagagccaaacagccaaatgtgcctatagtttctgcaaacagaaatgcatgtaaatatgtattgcatcacacctacctctgcattaacacattataaatataagcagaggagtacatcaccctctgggcccccaacagccctgctctggacagtcctagtcgatgtggactaaatcataaagtctttccccaaaggctcaccctcagcctctgtctgagggaagcaacagagagggaatcaggagacctaagttctacccccagctattaccaacttgtgacatgagcaaattggctccttttcctggggtaggtgtgggtgagaggataagatgaaagatggattagtcaaagccccttgtgaaagggaggagccccataagaatgctaagtactttcatctcccacttgcaggtctcctggtttgaaaaacatgtgtctttctttcccccacaggcaagacaagcttatcatttccaagacattaagcggtggctcacacctgtaatcccagcactttggggaggccgagtcacgcagatcacttgagaaatcctgtctctactaaaaatacaaaaattagccaggcatgatagtgcatgcctgtagtcctagctactcaagatgaggaggcaggaaaatcacttgaacccaggaggcagaggcttgcagtgagctgagatcacacctctgcactccagcctgagtgacagagcaagactgtccaaaaaaaaaaaaaaaggaaattttgctcctgacactttttaagtcaaaagttaaaaggaaaagaatgagttttttaaaaaagaaaaaaaaacaaaaaaaaaaatagaaaagaaaaacaaagctggggccgggtgcggtggctcacgcttgtaatcccagcactttgggaggctgaggcaggtggatcacaaggtcaggagtttgagaccagcctggccaatatggtgaaaccccatctctactaaaaatacaaaaattagctgggcggggtggcatgcgcctgtagtcccagctgctctggaggctgaggcaggagaatcgcttgaacctgggaggtgaaggttgtagtgagccgagatcgtgccactgcactccagcctgggtgacagagcaagactccatctcaaaaaaaaaaaaaaaaaaagaaaaaaaaagaaaaacaagggttaattctccattgccatgttctagaagcaggcgtctcatctttcctgtctcgtgctatcccaaaacacagagaacacagatccgttttcctcagacacctaccagagactcaggacatagctctataaagttagcccaactcctcccatgacacaattgactcagaagccagctgttaggcgtttttaacccacaagcagcccatctgcaaacagaagcaggggcttcctcacaggcgtgaatttaggggctgggacagcagcgcccactctcttccctgcgctctgatggtgtgagaagaacggagtgggctgggcacggtggctcacacctgtaatcccagaactttgggaggccaaggcgggaggatcacttgaggtcaggagttcaagatcagcctggccaacatggtgaaaccctgtctctactaaaaataatacaaaaattagctgggtgtggtggcgggcgcttgtaatcctagctactcaggaggctgaggcaggagaatcacttgaacccgggaggcggaggttgcagtgagccgagatcatgccactacactccagcccggatgacagacaaaaaaaaaaaaaaagcatggagtggctgtggctgcggctgagcagaggtaatacacgtctggaaaacccaacagaggacgagacagcaggttgatctgggagaataggaagaagacccaggaacatgtccccacccccagcccctgaacagacgtttttctgaccagactcccacatacaggtggtcctggcgcttaaaggccttgctgcagattttgcagacgtgcttcctttcctggctgtgtgtcaggtagtgcttgctcagagaactggcgctgctgaacaccttcccgcacaggctgcagtccagaagtgggttttgaggggaactgtgctgccgctttcctttcctggcactccccgaggtggcccttcctccttcgtcagcctctttagccttaagcacacctagccccaggtctaaacagagggagaaagcacaggttatacacagccaaggcaaccaagcgaaaagcacgactaaggcactctacacctcttagaaccatggtggccttgtaagtgttgcgcgagaactcttgctccacacaaagtaaacaaggttcaggagcaggtgaggggaacagaagccctgcaggatggcacccggacttggtgccacgtgtggagggatgactgcagactgaagcccttccagagcagcatgaccacaatgggctgggctttatgaccacaccatcacctggtactcttggaacggcaattagaaatatattatccaaaaccttggaaaagtagaaatccttgcacacacccagccaattctgtttttggggttttcacataaggaaataaatgtagctttgtacaaagatctagctgcaagggagtaaactgtcatactgcttttcctggtgaaatgttataaacaacctaatatctgggttgggtgtggtagctcacacctgtaatcccagcactttgggaggctgaagcaggcggatcatttgaggtcaggagttcaggacgagcctggccaacatggtgaaaccccgtctctaccaaaaatacaaaaattagctgggcatggtggtgtgtgtctgtaatcccggctatttgggaggctgaggcacgagaactgcttgaacccaggaggcggaagctgcagtaagctgagatagcaccactgcactctagcctgggcgacagagtgggactctgtcaaagaaaaagaaaaagaaagaaagaaagacaggaaggaaggaaggaggaaggaaggaaggaaagagagagagaaagagagagagagaaagagaaagaaaggaaggaaggaaggaaagaaggaaagagaaagagaaagataaggagagaagcaaagaaagaaaggaaagaaaaagaaaaagaaaggaaaagaaagaaagaaaagaaagaaagaatcagatggactagtaggattattagctggttttattttcctctttttgtataggtaaattgtttatattttatgtatcccttggataaaatgataaaatatatagttatgaatcacatcacccaagaaatagttaaaggaactgggaatattcagtttggagaggtcagacgtcttcaaatatctgaagggccagtgtatacaggagacagcagactgcttctgtcttgctctaagtacagtggtgcgatcacagctcattgcagtctctaagtcctgggctcaagtgatcctcccacctcagcctactgagtagctgggactacacgggccaccaccactcccagctgatttttaaattgttatttgttgtagagctaggcttggtgaatgaaaattaaagggaagctgacctcacaccactggaaacatagggtttggccttgctcactgctgtgttctcagatgcgagagttcccattctggcactcacaggcactcaataactgtatgttagatgaaggaataataaaagatttttctactttttagattgacctgaaaggtggattagactgtctttttttttttaattttttttttttttgagactgagtcttactctgttgcccaggctagagggcagtggcgcaatctcggctcactgcaacctctgcctcccaggttcaagcctcagcctctgcagtagctgggactacaggtacctgccaccatgtccaactaacttttgtatttttagtagagatggggtttcaccatgttggccaggctggtctcgaacttctggcctcaggtgatccacccacctcagcctcccaaagtgctgggattacaggtgtgagccaccgcgcccagcctgcctttttaacttcttatttcttattattttcttgatagagatggggtctcactatgttgtccaggctagagtgcaggggttattcacagacgcaatcatagctcaccgcagccttgaactcctgggcgtgagcagtccttctgactcagcctcccaagcaggtgagactacacgtgcacaccaccatgcccagctaatttttatttttatttcttgagacagggtcttattctgtcacccaggctacagtacagtggtgcgatcacagctcattgcagtctctaagtcctggtctcaagtgatcctcccacctcagcctattgagtagcacgggccaccaccaccccagctgatttttaaattgttatttgttgtagagatggggtctcactatgttgcccaggttagtctcaatctcctggactcaagcaatcctcctgacttggcctcccaaagtgctgggattacaggcgtgaaccatacatagcacctggcttaaactgccttatgagatggcaagtttgtttgtttgttgagatggagtctcactcagtcacccacgctggagtgcaatggcgccatcttggctcactgcaacctctgcctcctgggttcaagtgattctcctgcgtcagcctcctgagtggctgagattagaggcgcctgccaccatgccaggctaattcttatatttttagtagagacggggttttgccatgttggccaggctagtctcaaacttctggcctcaagcgatcctcccacctcagcctcccaaagtgctgggattacaaagtgcatgagccactgtgcccagccaagatggcaagtttggaaataataatttatcagggatactatggagatgggatccaagaattcaatgggccagggcatgggaagagcaggaggttgctctaaaggatccaatcgtgcaaattctctgtggctcatgagatgcagtgtgacagacacagcagaagggaaactgggctgggagtcttgaggcctagactctcctcccaatcctgcctgtggccatttgtcatggaacttgcttggcctttgtctttgtcctctgagaaattactataatgagtagtcaaataactccaacagtttcaacaaggaaaaaccgggctccctcaggcaaaagtccttagccttactcagtcacttaaaaatgcctattaaaatcgagaccatcctggctaacatggtgaaaccccgtctctactaaaaatacaaaaaattagctgggggcagtggcgggcgcctgtggtcccagctactagggaggctgaggcaggagaatggcatgaacccgggaggcggagcttgcagtgagccgagatcgcaccactgcactctagcctgggcgatagagcgagactccatctcaaaaaaaaaaaaaaaaaaaaaaaaaaaaagcctattaaagcaactataaaactagaaaacaaaacgtttttaaaaattggcaaggaggccgggcacggtggcttatgcctgtaatcccagcactttgggaggccgaggagggtggatcatgaggtcaggagtttgagaccagtctggccaagatggtgaaaccccgtctctactaaaaatacaaaaattagctgggcgtggtgggggacacctgtaatcccagctactcgggaggctgaggcaggagaatcgcctgaacccgggaggtggaggttgcagtgagccaagattgcaccattacactctaacctggtgacagagaaagactccgtctcaaaaaaataaataaataaataaaaattggcaaggacactgaaaaacaggcaaacagaggaactagcctgggaagtcacttgatcttcttagaaaccagtgttataagggctctacagttttttaacatttatttatttatttatttgttgagatggagtctcactctgttgcccagcctggagtgcagtagcatgatctcagctcactgtaacctccatctcccagattcaagcagttctcctgcctcagcctcccgagtagctgggattacaggcacccaccaccatgccaggctaattctttttttttttttttttttgagacggagtcttgctctgttgccaggctggagtgctgtggtgcaatctcggctcactgcaacctccgactccctggttcaagcgattttcctgcctcagcctcccaagtagctgggattacaggcacgtaccaccacacccagataatttttgtatttttagtagacagatttcactatgttagccaggatggtcttgaactcctgacctcatgatccgcctgcctcggcctcccaaagtgctgggattacaggcgtgagccaccacgcctggccaaattattgtatttttagtagagatggggtttcgccatgttggctgggctggagtggaactccttatctcaagcgatccgcccacctcagcctcccaaagtactaggattataggcatgagccaccatgtccggccagagctataaaattgtttaatgctccgtctgggtaaactgactttgaggaaaatattcaaagaactaatccaaaagaaaactcaacatgtacaaagttgttcacagaaacactttaacagtccaaacagcaagaatatggtctaacagtccaatggaatagctatttcagtgaccctcagtatgaaggtctaccttcaatatgaaagcaaatacaccaactcttacaacttaaatggaattatatacttaatattatctctgcaagactatgtatgtctgactttacccacgtttaaaaatttacaagtgaggtcaggtgtggtggttcacacctgtaatcccaagcactttggaaggccaaggtaggcagattgcttgagctcagttcgagaccagactgggaaacatagtgaaaccccttcactactaaaaatacaaaagttagctgggtgtggtggcacacacttgtaatcccagctactcaggaggctgaggcgggagaatcacttgaacctgggaggcagaggttgcaatgagccgagattgtgccactgcactccagcctgggcgacagagcgagactccgtctcaaaaaaaaagaaaacaaaacaaacaaaaaaaccacgaatatctcgccagtgctttaaggtctatgaagtgtgtttacaatagttccttcttttgttttactctggggggaagcagagaggatattattgtccacctgctttatggataaagacactggggtctaagaaggcctgacaaccaaagatcagaagggaccggaccccagttcattctggaaatgtgacatcagcctctaaggtgtggtaatgggaaggaaagtcttcagtaaatgctaacatctgcccacacaccacacaaaagataaggatatccccagacacctaagtttctgaacattattccctagaatgagtgttctgtttcctttactaagaattgggggccgagtgtggtggctcacgcctgcaatcccaccactttgggaggcggaggtgggaggatcacttgaggtcaggagttcgagaccagcctggccaatatgatgaaaccccatctctactaaaaatacaaaaattagccgggcatggtggcaggcgcctgtaatcccagctactggggaggctgaggcaggagaattgcttgaacccggaagccagaggttgcagtgagccaagaatgcaccactgtactctgcctaaaaaaaaaaaaaaagaattggccgggtgcggtggctcatgcctgtaatcccagcactttgggaggctgaggcgggcggatcatgaggtcaggagatcaagaccatcctggctaatgcagtgaaactccgtttctactaaaaatacaaaaaaattagccgggcgtggtggcgggcgcctgtagtcccagctactccggaggctgaggcaggagaatggtgtgaacccaggaggcggagcttgcagtgagctgagatcgcgccactgcactccagcctgggcaacagagcaagactccatctcaaaaaaaaaaaaaaaaagaattggggaatgattcccaagtaggaaaaaaggtgactgttccctaagtcacctgtaggagggaaaaattttcttaaccaatccatgcagaatcagtccctagctggccacagaaactgtcgaacatcctgcagggcccttctacccaggtgacagcctcaccttgtaaggatgcctgagactccgaatctgcgtactcctccagcagcttcacagaatcactgtccttcccggagtacagggacaaggtgtctaagttgtcctccagcacctcgctggacatgtcaggcgttgggaggctggggtccgggtccagaccactcaggccagcataaagaaagcctcgcgtgttgggacccaaatcccggttgagggtgtcgctgcagttgagcccttggctctctgaaaatgaagggaggtgcatttctgatgggagggcaccctcgtctccaaggctgtactggtccatggctctccactgccaggtcttggccaaaagctactctccagataagcaaaaccatgtaaggagacagggaggagagagcccttgatggcaactaattcctgaaaatgaagcaagaagaatgaaagttattaggtggcaaaacagcattgtgggcagagcacggacttgcaatgcaagcagacctcgatctgggtctgttctctgcctcataacagccatgtggctttgggcaagtcacttaagctccacgagccccaggtgcctcatctgtaaactgggcataagagtacttccttcacaaggttgttgtaacaaataaaagtacttccagcaacatggtggactgaactgacctcttgctccagctataaacatatacatgtatgacaaaagataattttttaacacatagcctaggtcaaaagacaggaaaaatcccaagtgccagcagcaacaagaaaactcaatgctggaggtgtaagctcacgtaggccccaggggaaaatcagaatcagatacagggcctagagccatttgtccaatatggtggccactagctccatgtggctatgaagtacttgattttttcttttaattttttacagatatcaaatcgaaaatggataattttttttaagatatggggtctcaccatgttgcccaggctggtctcgaactcctgggctcaagcgatcctcccaccttggcttcccaaagtgctgggattacaggtgtgaaccagcgcacatggccctgtgaagcacttgaaatgtggctggcttgaactgagacaggctgtgagtgtaaaatacaacctggatttggaaaactttgtacccaaaaaagtcaatttaatacgtttctatatagattaaatgtggaatgataattttttttcttttcctttttttttttttttgagatggagtctcattctgtcgcccaggctggagtgcagtggcgggatctcggctcactgcaacctctgcctcccaggttcaagtgattctactgcctgagcatcccaagtagctgggactacaggtgcacgccaccacacctggctaatttttgtatttttagtagagatagggtttcaccatgtttcccaggctgatctcgaactcctgacctcagatgatccacctgccttggcctcccaaagtgctgggattacaggcgtgagccactgagtccagcctggaatggtaatattttccatataatgggctaaatgcaacatgttattaaaattaacttcatctgcttatctttttaatgtggctcctaggaaatttagattatatatggctcgtattctgtattatcaaatgctgccctgccgtctgggacctgggatgatagcagacacgtgggtgagggaaacagggccttgagttcccaggaaacggaggcctggggccctggaagagctgaaccatccacaggaaaactaaataaatgaaaagaaaagcttcacacaagcctagaaaagtacccccaagaaccagaaaaaaatagccagtgagagatgacaaagctgagcattctacaagtctacaaaagaatgacaattaccctgatggcaaacttctcaacagaaacaagcctcgaagataagaataagaatatcatcagtggactaaggaaaagtcagccagcacagagctcaacatacaggcatgagagagggagggaggaggctgggcgccagggctcacatctgtaaccccaacactttgggaggcagaggagggaggattgcttgaggccaagagtttgagaccagcctgggcaagacagcaagactggcttctacaaaaaattaaaatatcagccaggtgtggtggcgtctatctgtagtcccagctattcagaaggctgaggcaggaggatcacttcagcctgggagcttatagacttttacacacaaggcctaagaatctaccttacagaccctggtccaaaaaatgactaaaagttttgaatcaattgggaaaaaaaaaaaagagatgatggtaacttcatacttttaagcttgcacactaaaagaatctaagtataaccaccaagagaagaaaaataaaccacataacatctaaactagtagaatttattccccccaaaatgggcagggggagtggggcagcagagtttactttaaaatactgtagggaaaagagagaaaagactcatagtactgcaactaggaattaaagaggaaacacatcactaatggccttagaaaaaataagaaggattataaaagaatactacaggccaggcgtggtggcttacgcctgtaatcccagcactttgggagaccgaggtgggcggatcatgaggtcaggagatcgagaccatcccggctaacacggtgaaaccccatctctattaaaaatacaaaaaattagccgggcatggtggtgggcgcctgtagtcccagctactcgggaggctgaggcaggagaatggtatgaacccaggaggcggagcttgcagtgagccgagatcgtgccactgcactccagcctgggcaacagagcgagactccatctcaaaaaataaataaataaataaatagaaataaaataatactataaacaactgtattcagataattaaaaaattagataacttagatacattaacttagttatttaaattagataacagattaaaatgggcaaactgctagaaagatacaaattaccaaaacttactcaagaagaaacagaatttcttttttttttttgagatggagtttcgctctgtcgcccaggctggagtacagtggcgcaatctcagctcactgcatcctccgcctcccgggtttaagcaattctctgtctcagccggattacaggtgcccaccaccacgcccagctaatttttttttttttttcctgagacagtttcactctgttgcccaggctagagtgcagtggcgccatctccgctcactgcaagctccacctcccaggttcacgccattctcctgcctcagcctcccgagtagctgggactacaggtgcccgcccccgcgcccggctaactttttgtatttttagtacagacggggtttcaccatcttggcgaggctggtcttgaacttctgacctcgtgatccacccgcctcggcctcccaaagtgctgggattacaggcgtgacccaccgcgcccagccaagaaacagaatttctgaatagacctatgagaaataaaaagactgggccaggcacagtggctcacgcctgtaatcccagcactctgggaggccgaggtgggcaaatcactggaggtcaggagtttgggaccagcctgacaaacatggtgaaaccccatctctactaaaaatacaaaaacttagctgggcatgatggtaggcacctgtaatctcagctactcaggaggctgaggcacaagaatcacttgaacccgggaagcagaggttgcagtgagctgagatcgtgccactgcactccagcctgggcaacagagtgaaactctatctcaaaaaaaagaaagaaagaaaagaaagaaagaaggaaggaaggaaggaaagaaagacagactcaactagtaattttaaagctccctgtacatcttgccatagaaacaccaaaaacaaaaaatcaactttaacaaaactctgggaagcagtcaaagctttatagcaaccaagcaaaccctaagaaaaaggtgactttgatgtttgattacaggctcacgcctgtaatcgcagcactttaggaggccgagatgggcagatcacctgaggccaggagtttgagaccagcctggccagcatagtaaaaccccatctctactgaaaatataaaagttagctgggtgtggtagtgcacgcctgtagtcccagctacttgcgaggctgaggcaggaggatcgctcgaacccaggaagcggaggttgtagtgagccgagattgtgcctctgcactccagcctgggtgacagagcaagactctgtctcaaaaaaaaaaaaaaaaaaatggtgactgaaacccagtgggagaactttgtggcatatttaacttacccctgccccatccctactccctggctcagcagtggtctcgaaggtagcagcccatgtttctggtgtgggttccctggtgctggagggaacagagaggatctggttttcaaagaacagtggttgtctgtctgacctgtcagtggctccctgaaagcccaatgcaaagatcttgcctttttttgtacctaactggcagctctctggggtgcagagtggctacagacagggcgtttgttgcaaacattaaagtcaaatgaactagatgctgcaggctggcgcaaaagatattgattggggcaaacaactgacttgctaaaagccagggaggaaaagctgggaagttggatactttggagaaataaaggctttgaaaaaatgagccaggcatggtggctcatgcttgttatgccagcattttgggaggccgaggcaggtgaatcacctgacatcaggagtttgagaccagcctggccaacacggtgaaactccgtttccactaaaaacacaaaaattagctgggcatggtggcaggtgcctgtaatcccagctgcttgggaggctgaggcaggagaatcacttgaatgtgggaggtggaggttgcaatgagccaagattgcgccactgcactccagcctaggagacaagggcaaaactctgtcccaaaaaaaaaaaaaaaaaaaagtccacactggcagtttcttataaagctacacatagtttttttctgcatctatttgatgattgtaatatatatatgtataaaatcttatcatgcaatccagcaactacactcttaggcatccatccaactgagctgaaaacttcagtccacacaaaagcctgcacacacatgtttatagcagctttgttcataactgcccaaaactggaagcaatcaagacatccctcaataggtgaatggatcaacaaactgtggaacatccagacaatggaatgttcttcaggaataaaaagcaataagctatcaaaccacacaatgacatggaggaaccttaaatgcacattgctaagtgaaggaagccagtatgaaaagattacataccgaaaaaaaagaaagacaagactacatactgtgagactccaactatatcacattctggaaaaggcaaaactatagagacaataaaaagaccagcagttgtgtggtttgtggggtgaggagtgaaactattttgcatgataatctaatgctgcatacctgacattataccatagtcaaaacccacagaactatacaacacagagactgagctctggctgggtgtggtggctcacacctgtaatcccagcactttggcccaggagtttgacaaagtcagaccctgtctctatgaaaaaaaatttttttttaattagctgggcatggtggcacatgcttgtggtttcagctacttgggaggctgaggagggtgaatcgcttgagcccaagaattggaggcttcattgagctatgattgcgccactgcactccagcctgggcaacaaagtgataccctgtctcaaaataattaattaattaagtattaaaaaaattaaaaaatccaaatgaataaaaaaagagcttccacatattcctgggaatttagaaggtggcatctcagggtgggcacatgtttggaaaggaccagagaaggcttccaagctctcacctctggctgaccttcgctctgtgcaggcagagagtgaaggcgaaggtagggttgttaaccgcctgcctgagtgtggaagcagtgccccgctgcaactactgggagctttttgttttttgttttctgttttgttttttttttagctccaggagtttaagaagatctctgttaagtcactagctgaccactaaactaacagaacagactactgaccacaccccacaaagaacacaatctttacaaaaatagcttagaaaagccactaaacaaacagttacaacccacaataagcagaaacaaccaagcctgaggacagggaagaaaggaagaatcccattcccagagttaccagactgcaatatgcaaaatatccagtttacaggctgggtgcagtggctcacgcctgtaatcccagcattttgggaggccgaggcgggtggatcacctgaggtcaggagttcaagactggcctggccaacatggcgaacccccgtccctactaaaaatataaaaattagctggctgtggtggcaggcacctgcaatcccagctacacgggaggctgaggcaggagaatcgcttgaactcgggaggtggaggctgcagtgagccaagatcgtgccactgcactccagcctgggcgacagagactgtctccccaaaaaaaacaaaaacaggccaggcgcgctggctcatgcctgtaacccctgcactttgggaggtccgggagggcggatcacttgaggtcaggagttcaagaccagcctggccaacatggtgaaacgccatctctactaaaaatacaaaaattagctgggcgtggtggtgtgtgcctgtaatgccagctactcaggaagctgaggcaggagaatcgcttgaacccgggagatggagtctgcagtgagttgagattgtgccactgcactccagcctgggtgacagactgagactccatttcaaaaaaaactaaaaacaaaaaacaaaacaaaaaaaaccaaacagataaaatgtccagttttcgaatcatggaagcttgagaaaaatgagagatcgagtttttcagcaaaaaattatgagtcatgaaaacaaaaaagcatagccccttcagatggccatctgtctcacacaaatggaatcagatgacctgtggccttctgtgtctggcttctttcactaagcacagtgttttcaaggttcacccccattgcagcacgtgtcactgctccatttctttccagggctaaataatgttcccctgtctggagagaccacattttgtttaaccactctcctgttgatgaacatttgggttacttccatttgggggctattgtgaataattctgctcacacctagatgttaaagaaatgcttcatgactcactgaataacaaatctagtgcatacttgaataacgggagtttgggactagatttctaggccaccagtttctactttctaagaacttttcatgttgatatgtaatagaacctctgcacctgcaatgtctgcattgcatgttatatgtctacctgcctgtctgcgtgtatgcagcctattgaggcagcacaaatttaaagtcacatacaggtacgtaatcccatatacaactctgagacccaactgagtttcagaatttgagggggttttagaagtgtaaatcaatgcataccccgtattttaagtaacttccagtggggttcaaggcagtacctggtaaccaaataattatttctgcatcattgcctatgaccactcagcgtacgtgaaataaaggctgtgaaaagcaacatgtagggtcaggtttggccaccagatgatattcgagatgcctcaggattctcagagctttttgggtttccaaaaaatcagggagaggagtgtggatctgtaagccaaattcaaatttcaccagttccacagtgtctgctacagtgctgctataaactgttttcaccactctatgaggggaaaaacccatctccccctgcatctcccaataataaaaacaagtgaataaaaatcacatatatattttttgagacgaagtcttgctgtgtcccctaggctagagtgcagtggtgcaatctcggctcactgcaacctctgcctcctgggttcaagcaattctcttgtctcagcctcccagtacctgggattacaggcactcaccaccacgcctggcaaatttttgtacttttagtagagatagggtttcaccacgctggtcaggctggtctcaaactcctgacctcaggtgatccacccgcctcggcctcccaaagtgctgggattacaggcataagcccccgcgcctggcctaaaaatcgtatttattaagcactttctccacatcgggtatcataccaagtgctttatatgcattaacttacttctcacaaaaacctagattgtagtattacttcccttttacaaataagagagactaatttgtccaaagtcaaaacccaacagccagatcttaaacccagatactctgacattagcgctaatggtcttgcccattacacagtactgattccctataaactgaactgtatactgcactgctccaattaaactacaaaacacataaggtgctgggtcagggggaagaatgtctctggactccccaaggccaaatcacctgctttccaatatactcccatagtccacagaacaaactggtcaggttacaacctcagacaggcaagccaaaagtccaaaggccatgccttgatatttacatccttctccagacagtaaagcaaaaccctctctaccgatactgagcttccttttattctgtcaacaaatacattcaattcaacaagagttttagcaccttctaggtacaaaactctctgctagcccttacgaggcagagtttatggtctcctgcaacccggcagacattcccaaggacccaaatactctttccaagaattttatcattttgtgttttcatttaaatgctcaacatcactaacgatcagggaaatgcaaatcagaaccacaatgggataccaccttactcctgcaagaatggccgtaatcaaaaaataaaaaaataacagatgttggcatggatgcggtgaacaagaaacctttctacactgctggtgggaatgtaaactagtacagccactatagaaaacagtgtggacattccttaaagaacaaaaagtggaactaccatttgatccagcaatctcactcctgggtatctacccagaggaaaagaagtcattataagaaaaagatacttgcacatgcatgtttagagcagcataatttgcaattccaaaaatacggaaccagcccaaatgcccaccatcaatcaaggagtggataaagaaatatatatatgatggaatactactcagccataaaaaggaacgaaataatggcattcacagcaacctggattgaactggagactattattcttctaagtgaagtaactcaggaatggaaaatcaaacatcgtatgttctcactttgtaagtgagagctaagctatgaggattaaaggcataagaatgatacaatggactttggggacttggggggaaagggtgggaggggatgagggataaaagactacaaattgggttcaatgtatactgcttgggtgatgggtacactaaaatcttacaaatcaccactaaagaacttactcatataaccgagtaccacctgttcccccaaaatctatggaaataaaaaactaaaaaaagaaaaaagaaaagaaaaacccagtacatctggatcattagaggactcccttgtaaccgagtactaccatgtggtttcaatgcctgggtgtgtttatgattgcactcatgccaaaaaggactacttaattgcttcaggctaaaaagaagaggatggagggggatttagttcataataatgccttcgggctctactagaggccagctggcatcacggtacaaatggaagttttgctgcagttcaaattgagacaagggatgggagaattgagacctcacagggcctgctaaacccaaaagggcccagagtggcagtcggcaaagtaattgtttcaaggagcaggtaagtttcaggaaatggtatccctctcattaaattaaatcggtttggttgctttgtttatatttaatttgcaaattgattttggctttatagctgcacaggagctatacactttaggaacttatgtcttgttctatcatcactgatgccttaatagttttaaaacaatttaagtcaacattggggatccgaagcaattttaattttttttcttttaaaaaaatgctatcagcccagcgcagtggctcacgtctgtaatcccagcattttgggaagctgaggtgtgcggatcacttgaggtcaggagttcgagaccagactggccaacatggcgaaaccccgtctctactaaaaatacaaaaattagccgcgcatggtggtgggtgcctgtaaccccagctactcaggaggctgaggcccaagaatctcttggacccgggaggcggaggttgcagtgagccaagattgtgccactgcactccagcctgggtgacagagtgagactccatctcaaaaaaaaataaaataaaatttaaaggggccatcattccatgactggtgggggtgaggggaaacaaaggattcttctatgaaatgctacgaccttttgggaaggtaacctaccatgagattctagactgtagaagtaagtccacaatagataaataatatttactatgtgtgttgtttggaggggagggaacaatctgaatgcccatctgatttacaaatatattttatttagtctgcaatatatttaaatatgtttccattagttatccagttaaagaatagatggggccaggtatggtggctcacacctataatcccaccactttggacagctgaggcaggcagatcacctgaggtcaggagttcaagaccagcctgaccaatatagtgaaaccccatctctaccaaaactacaaaaattagctcggcatagtggcactcacctgtagtaccagctactcaggaggctgaggcaggagaattgcttgaacttgggaggcggaggttgcagtgagccaagatcatgccactgcactccatcctggtgacaaagccagactccatctcaaaaataaataaataaataaaataaggccaggtgcggtggctcacacctgtaatcccagcactttgggaggctgaggcgggcggatcacaaggtcaggagattgagaccatcctggctaacatggtgaaaccccgtctttactaaaaatacaaaaaattagccaggcgtggtggcgggtgcctgtagtcccagctactcgggaggctgaggcaggagaatggcatgaacccgggaggcggagcttgcagtgagccaagatcaggccgctgcactccagcctgggccacagagcgagactccatctcaaaaataaataaataaataaataaaataaaataaataatagaaaaatagatggatagagcactagagcatcactatccaaaagcactttctgtgctactaagcctgcactgcccaatactgcagtctttagccacatacacagaaatgcagctaacacccttgaggaactaaactctttattttatttaagtttagttaaatttatttatttatttatttatttagagacagagtctcactgtgtcacccaggctggagtgtagtggtgcaatctcagttcactgcaacctccacctcctgggctcaagtgattctcctgcctcagcctcctgagtagctggggattacaggcgcccgccatcatgcccagctaatttttgtatttttagtagagatggggtttcaccatgttggctaagctgggtctcgaactccttacctcaaatgatccgccctcctcggcttcccaaagcgctgggattacaggcgtgcgccaccgcgcctggccagttaaatttaaacaggtacaagcggctaatggctaccatatcagatggtgcaaatctagggatttctcattcaagttaggctttccaacttctatttaaaaatgtgaaagaaaaaatcagaagatctgccaatgctgagtccacattcctgcaaggcaacaattggttggaggtgagaagcccccaccactccctattctctcagctcactgatttctgtgccctgccaggcctctggaggcatctgagtttatgaccctccaaatgaaaccctccaaactcaggcttaaatgtcacctccactatagagaacacttccaacataacaaagtctgagattaatttctccctcctctgaaccctgacaagcacttgtgtaacaatccacttaacatttactctaaattatctaggaagttaattatctttaaagttctcccattttctccagactctcagctctaggatggctgggactcggccttaggtgtctaaacttctcacagtatcttgcctagcacagaactttgatcacagaaggctctgagcatccttttcattcatgagtgacagaattccattgtgccacctcttttcctctttgaaaagctccaaccactgttctgccaccacaccccccacctcctaagcaccaccttctcccttctctccctgcatccatgttaccagggaaagggtcatcaagtctgagtaacagcaggttcctgggagttgagcagacagacttgcagctttcaccctagctatgcaatttccttcattttattttattttattttttgagacagggtcttactctgtcgcccagactggagtgcagtggcgtgatctcggctcactgaacctccacctcgcggattcaagcgattctcccatctcagccacccgagtagctgggtttacaagcatgtgccaccacacctggctaatttttgtatttttaatagagacagggttttgccatgttggccaggctggcctcgacctcctgccgtcaagcaatccacctgcctcagcctcccaaagtgctggtattacaggtgcaagccactgcacccggcctgcaatttccttccttactttcctactccaattttttttgttttcctgagttgaagtctctctctgtcactcaggctggagtgcaatggcgtggccttggctcattgcaacctccgcctcctgggttcaagtgattttcctcctcaaccttccgagtagctgggactacaggtgcacaccaccacactgggctaatttttgtatttttagtagagacgaggtttcactatgttggccaggctggtctcaaactcctgacctcgtgatccacccacctcggcctctcaaaatgctaggattacaggcgtgagccactgtgcccagcctccactccaaatattattgtaaactatagacccattttgtttggcctacacagtatttttacaaattggattagtcatcaacatttttttttaatggggagatttcaccttcctatatggatttctggtttcttttgaaaatgattagatttgatattccttcacagttaacaacgaggtagatctgagggacaaatggcatctctagaaagggcttatggtctccagttttcccagccctcacttatcttcctgcctggcccttataatattcatcattgtaataataataataataataacagtgaacatttattgaggctttatgacatgccaggtactcttgtaatcacttgtatgtcatcgtatttaattcccacaatacttgaggcatatactgtattattaaccctatttcaccaatgaggtaaatagtccagagaagttgagtaacttgcccaaaaccaagctaggattcaaccctgggtagtctaatttcgaaacccttacgcttgcccgctccactatgcttttatcacacacttgagactgggactcctgcttcacactcgtgcctacattcttaagtagaacaatcaagaaagacttccagctgggcaaggtcattctcgcctgtaatcccagcactttctgaggcctaggtaggaagattgcttgagtccaggagttcaagaccagcccgggcaacaaagtgagatccccgccgccccccacccatctctacaaaaaaaatcaaaaattagccaggtgtggtggtgcacacctgtggtcccagctactcgggagactgaagcagaaggattgcttgatgttgggaggtcgaggctccagtgagccaggatcacaccacggcactccagcctgggcaaacagcgaaaccctgtctcaagaaaagaaaggagaaaagaaaagagcaaaacaaagcacaaagactccctcctatagtcttatagttatgtaaccaataactaattttaaccagaaggtaaagtcattttctctggccgggcacggtggctcacgactctaattccagcactttgggaggctgaggcgggcagatcacaaggtcaggagatcgagaccatcctggctaacacggtgaaatcctgtctgtactaaaaatacaaaaaattagccaggagtggtagcgggtgcctgttgtcccagctactcgggaggctgaggcaggagaatggtgtgaacccaggaggtagagcttgcagcaagccgagatcactccactgcactccagcctgggcgacagagcgagactccatctccaaaaaaaaaaaagtccattttggctgggcgtggtggttcatgcctgtaatcccagcactttgggaggctgacgcaggcagatcactggaggccaggagtttgagaccgccttgccaacatggtgaaaacccgtctctactaaaaatacaaaaattagccgggcatggtggtgggcacctgtaatcccaggtactcaggaggctgaggcatgagaatcacttgaacctgggaggtagagtttgcagtgagctgagatagtgccaatgcactccagtctgggcgacagagcaagactctgtcctaaaaaaaaaaaaaaaaaaaaaaaagcgcattttgtttttttgtttatatataatgggtttattactgcccttttaaaatcaattaataaacattttgaaagttgattagtttaaacttctaatacagcaaatgccagtagataaagtttacataaacaaaaattctctacagccttcaataatttttaagtgcaaaggggtcttaagagcaaaagttttaaattagctgggcgtggtggtgcacgcctgcagtcccagctacttgggaggctgaggcaggagaattgcttgaacccaggaggcagaggttgcagtgagccgagatcgcaccactgcactccagcctgggaaacagagagagactccatctcaaaaagaaaaaaaaaaaaaaagtttgagaactactattccaataagaaaaagtcctgcatgtccacatacacatgtgcccaagcagacacgcatctaaaagaaagaaacccgaaactgaaaattccaaagtggtggccggcaggcatattttataagttccctatgctgtcttttttttttttgagacggagtctcgctctgttgcccaggttggagtgcagtggtgcaatctcggctcaccacaacctccgcctcccaggttcaagcgattctcatgcttcagccttcccagtagctgggactacaggcgcctgccaccacatccaactaattttttgtatttttagtagagacagggttttactatattggccaggctggtctcaaactcctcagccgcctcggcctcccaaagtgctgggattacaggcatgagccactgcgcccagcctacgctgtcttatttaattcttaaattatcaaatgtgttgctagcatttaaaaatcagaaggtttcacctaaggatagttttctggcctcttctcaaagaaatcgaaagttctggcaacactggcctggcatttccactgcctggcatcacttagatgggacatacaatctttgcttcacgacaatccttacttcttccctttacctgtgccttacctgtaagtatctgagttgccaccctgagctagggaaggaaaaacgttttttgcaataaacatcaataaagaaacacacatcaatctatgtctgcactcctcctaacaggtcaacatgcacaataaatagcccttttccctgtttgacttctccaaagcagtaacttgtatgattaccattagtacggactttggtattgcttagaaaccctcttgagaaagaacgagatctatccaacaaagcaggtgtctttggctcagtgcaaaggaaggaaactcaccagaagagcaagttagtgaatctccagggaacaggaggacccagtttaggccccacagggagggggttcaggtgacaagcagaccactggatatgtcctcctggaacactgagtggtaaatgcaggatactcccaatttcttttgccctgaaagcaggtggtgggaaggaagaagcagtcaggacttgggtcccaaagaaacaagaacagagatgtgaaaatggagaagagcaacaatttttggaagaaggcagaaagcagtatcaacagcggagatttgagtgaggaggaaaggtttttttggtaagaagaaataattgttccttctttccttatttttcccccgtgggaagagacctagagaattttaccgggagaaacttaattagggcagaattggtgataaaataaggatatttgctggaaagttgggggtaggtgaggaggactggaaacataaatattagacgagagagaaactggaaggaattagttggtttgttctaagcgaagatattccaaaaaggggcactctaggtgtgaagaaaaaaattttgctggaaagtgatcctgaacggatgaaaaaaaactgggttaattttttttctttttttgcgctaagggaagttacttaaaggagggggaggggcatgtcaaggaaaggaggagagatttggagttttgctggaagatcctaaaaagggataaatctgggtgccccaaagtgggactatggaggaggaagggggattctgagcagaaggggcctggaagaggctagcgaatgcaaggcccagatgcagaaggtggggaggtcgggtagggcccgcggcgcgagctggggggctgcgagggggcagttgaggcccggggggacggagtgggaaagaaaagggggtgcagcgggccaggggatcctgaggagggtcttctccaagggggaagggcctgtggggtgcagcggggcccggagctgttgggttgcagaagatgcgtgcgtgacgcagggtgaggggcgcccgccgcgcctgctgcgcccctcgaaaggcagatggggccccctaaaaaaagaaatcaagaaacgaatgagattgtaaaaagggggaggggttgaaaaaagaggaaataatagtaatgggggataaggaggaaagggaggggcaggggcagcagcaaccgggttttacccgcccccgggggctcgcgcgccgggcctcgcgcctggcgcctcgcggggctcccagcggcctcccgccttccccgcgccgcccggggcgcacgcgcagcccggcccacccccggatctcctcgctcacgcgcggcgcaggcgcgcgtacgtgaccgcgggccgcctcacgcctcccagagcggcctcgcgcgtgcctcctggccgcgcgctctcggctgcttctccgaggggcggggcttgccgcgggcgggaaaggaggcggttggtcgccattttgggagggggcggttgagggcggagagtgagaagagtgagccggggaggagcggcggggggaggggccagtcccccaagacccgcatcccgaggccgagagtcccgggagcctccactccagccattgttcctggtgggcggtgttagaacgcggtggcggccgctggatggctgcccccagtccccggaggggcctctgagcagcgtcctggtgctgggaggccgtatcgtctgtttccgaggaccctgtcgcgagcgcgggagtctctcagggtctcttctgcgtcattgggtgggggagatgtggggcgagctgctcctccctttttttaaaatttttttcagagacagggtctctccctgttccccaggctgcgatcacggctgccgcaccctccccttcctgggctcaggcgatcctcctgcctcagtctcttgagtagcagcgaccacaggcgggcgccgccacaccttgctaatttttacattttttttagagataaggtctcgccatgttgcccaggctagcctggttcccctgggctcaagcgatcctcctgcctcagtctcccaaagcattgggattataggtgagagccaccgcgcccagcctattcctcccttctttggggaaaggctgagccatctggggcccctgctccgtgctgagctgtgttgggaagggcggtaggccctggtgccgactggccaaggaccatcttttttttctttttttttttttttgagacagggtcttgttctgccgcccaggctggagttcagtggtgcgatctcggctcactgcaatctccgcctcccgggttaaagcgattctcctgtctcagcctcccgagtagctgggattacaggcacgtgccaccacgcccggctaatttgttgtattttcagtagagacggggtttcaccatgttggccaggctggtcttaaattcctgacctcgggtgatcaggtgatccgcctgcttctgcctcccaaagtgctgggattacagacctgagccaccgtgcccgacctggccaaggggtttgaactgtcctgcaactgaggcagataattcattccttagaaacggagtgctgaagatctgtggagaatgagagcagattagtggttgcccggggtggaaaggggcatcgcggatcttatctgggtaatggaaatattctaaaactgagctatgggccaggcgtggtggctcacgcctgtaatcccagctctttgggaggccaaggtaggaggatcccttgagcctaggagtttgagaccaacctgggcaacctagtgaaaccctgtctctaaaaaaaaaaaaaaaaaaaaattaactggagatggtggcatgcgcctgtagtcccagctacttgggaggctgaggcaggaggatcgcttgagcctgggagtccaaggctgcagtgagctatatgatcaggccattgcaccccagactgggggatagagcgagactctgatgggggaaaaaaagggttatggtgatggttgcacaactcagtaaatttctaaaaatcagtaagtatacacttaagtgagtgacttttatgtaaattatacctcaaagttttttttttttttaattgattattgggggaggaaacagaggaaagaagagggcctgtcatcttgctttaggatcccttcatttagcaagtttttattgggtctctgttctaggtgctcagatatagtgtctgggtcaaacagacattcctctcctcctggaacttatgttttagagcagtgctgttcagtagtaataaaatgcaaacttcaagcaccagccacttatgtaattttacattttctagtagccatgtttaaaaggaacaaaatgtaaagaaggcaggtgtggcggctggcacttgtagcccagctacttgtgaggctgagacaggaggatcacttgaacccaagagttggagactgcagtgagctatggccctgtctgtgtagagccactgcaccagcctgggcaacatagtgggacccattctcttaaaaaaaaaaaaaaatggcttgggacgggtgtggtggttcacacctgtaatctcaacactttgagaggctgaggcaggaggattgcttgagttcaggaggtcaagaccagcctgggcaacacacccaaacctaaaaatcaaataaataaaagtaaataataaaataaaagagaaagaaacacaagtgaaattaatttggtaatatttaatcccaaatatttcaacacattatcagtataaaaactaagagataatttacacttttggggctgtctttaaaaccccacatatacagtattttacattcacgggacatctcaattcagaccagccacatttccagggctccatggaaccttgtagcgagtggctctggtactgacagcatacctctacagggggacaagcaaatgcatttactttttttgttgtatttttttgatacagggtctcactatgtcacctaggctgaagtgcattgttgtaatcatgcctcgctgcatccttgacttcctgggcccaagctattataccacctcagcctcctgagtagctggtactacaggcctgcaccaccacacccagctaattttttgtatttttagtagagacagggttttgccatgttggccaggctggttttgaactcctaggctcaagcagtcttcctgccttggcctcccaacatgctgggattacaggagtgagccaccgtgcctggctgcaaatacatttataatgcagtatgttataccttgaagaaaaacaaaggaaagaggatggggtcagagggtattgttttatacaggtcagtaaaggcttctctggtgagattgcattgagcagagatctgaaggaagtaaggaagggtcctatgaaaatatctgggggaagaagagagggaacagcacgtgcacaggcactgaggcaggaagatgtggaacccttttgaaagacagcagagaggccaggcatggtggcttatgcttgtaatcccagcaatttggggggcccaggtaggctgatcacttgagcccaggagttcgagaccagcctggccaacatgttgaaaccccatctctactaaaaatacaaaaaattatctgggcatggtggtgcacacctgtagtcccagctactcgggaggctgaggcatgagaatctcttgaacctgggaggcagcggttgcagtgagccgagatcacgccattgtgctccatccttggtaacagagtgagactctgtctcaaaaaaaaaaaaaaaatcagaagaagagagaccagtgtggccagaaccacgtgagtgaagaaactaggggcagatggcatagggacttacaggtcatgctaaggcaggaattaaactcctggaaacaatttcagagggttcttcctttatttagcacactttttgttttgtggggttttttgtttgtttcttttattttctttctttttttcttttttctttttcttcttttttttcttttgagacagagtcgcgctctgtaacccaggctggagtgcagtggcaccatctcggctcaatgcaacctctgtctcctgggttcaagtgattctcctgcctcagccttctaagtacctgggattacaggctcgtgccaccacgcccagctaattttttgtatttttagtagagacggggttccaccatgttagccaggatggtctccatctcctgacctcgtgatccacccgcctcagctcccaaagtgctaggattacaggtgagagccactgtgcctggccttcttttctttttcttgttttctttttttttttcgcttatttagcacacattttaaaaatgctttgtttcagccatgtaatctctcttcttgatggaggaaataaggatcctagccactggacagatgagaatctagttaaaaaacaggacttaagctcctgaaataaattagcatcttctgtcattgatagacattgaacacttcatggacacagaagataaatgcaacacataaacaaaaaattagcattagccaagcatgcttgtaatcccagcactttgggaggccaaggcaggtggatcacctgaggtcaggagttcgagaccagcctggccaacatggtgaaacgtccatctccactaaaaatacaaaacttagccaggtgtgctggtgcgtgcctgtaatcccagctacgcaggaagttgagacaggagaattgcttgaacctgggaggttgagtctgcagtgagccgagatcgcaccattgcactccaggctgggcaacagagcgagactctgtctcaaataaaaaaaagcatttagcatttattttaaaggcctacaaattaaggtgacaacctaataaaaaaaaagaatataagatttgaagaggcacttcatacaagaggaaacatgaagtgaggactaaccacaacaacaagagaatgcaaattaaaaccaaagataccgcagcacacctaccacttcggtgaatcaaaaaacatttttttttttctgtttgctgaagcaagacgaactgagtatacaggactagtgacaggtaaaattggtagaaccacactgacaaacccaggggttaactctagaaaacttcttgatcatgtgcgccaagagatgcaacagaagaacaagcagcaatgtttgtaatagcaaaaaaaagaacagaaaagaaaggaaagaaacagattggatcctggattctggattgaataatcctggaacaagataaataaataaataaataaataggccaggcatggtggctcacgcctgtaatcccagccctgtgggaggccgaggcaggtggataacttgaggtcgagaatttgagaccatcctggtcaacatggtgaaaccccatctctactaaaaatataaaaattagctgggcatggtggtaggcacctgtaatccagctaaggcttaggaggctgaggcaggagaatcgcttgaatttgggaggtggaagttgctgtcagtgagctgagatggtgccactgcactccagcctgggaaacagagtgacagtgacttcatctaaaaaaaaaaaaaaagacattacttaaaaaactagagaaatctccaacaaaggccaggcatctgtaattccagcactttgggaccccaaggcaggaggatcacttgagctcaggagttcaagaccaccctgggcaacttggtgagatcctgtctctacgaaaaaattttaaaagttacccaagcatagtagcacacacctgtggtcccagctactccacaggctaaggcgagaggattgctttagctcaggactgcattcctatctggttaacagagcaagactgtctcaaaaaaaaaaaagaaaaaatctcaacaaagattggaatttagttaatagtaatgtatccactttttggggtttttttttttttttgagacagagtctcgctctgtcgcccaggctggagtgcagtggcgcaatctcagcttgctgtaagctccgcctcccgggttcacgccattctcctgcctcagcctcccgagtagctgggactacaggcgcccgacaccacgcccagctaatttttgtatttttagtagatggggtttcaccgtgttagtcaagatggtctcgatctcctgacctcgtgatctgccggcctcggcctcccaaatgctgggattacaggcgtgagccaccacgcccagccttttttttttttgagatggagtctggctctgtctcccaggctgcagtgcaatagcatgatcttgactcactgcaaccaccgcctcccaggttctgcctcagcctccagagtagctgggattacaggcgcccgtcaccacacccaactaatttttatacttttagtagagacggagtttcaccatgttggccagggtggtctagaactcatcctgacctcaggtgatccgcccgcctcagcctcccaaagtgctgaaattacaggcatgaaccattgcaccccgcctgttttgtgtgtgtgtgttttttttttttttttttttgagacagggtctcattctgtcgcccaggctgcagtgcagtggtgccatctgggctcactgcaatctccgcctcccaggttcaagccattctcctgcctcaccctcctgagtagctgggactacagaagtgcaccaccatgcctggcttatacattttttattttttggtagtgacggggtttcactgtgttagccaggctggtctcaaactcctggcctcaggtgagccgcctgcctcggccttccaaagtatgaggattttaggcatgagccaccgagcctggccaatgtttttgtagttttgacaaatgtatagttgtgtcacttaacaacggagatctgtctgagagatgtatcttcaggtgattttttccttgttgcgtgaacgtcgtaagctgtacaaacccagatggtatagcctagcacacagctaggctgtatggtgtagcctattgttcctaggctacaaacatgcagcatgcaactgtactgaatactgtaggcagctgaaacacaaaggtaagtatttgtgcatcaaaacatagaaaggtacagtagaccaggcgtggtggctcatgcctgtaatcccagcactttggaggccgaggcaggtggatcacctgaggtcaggagttcgacaccagcctggacaacatggtaaaaccccatctctacttaaaatacaaaaattagccaggtgtggtggcaggcacctgtaatcccagctacttgggaggctgaggcaggagaatcacttgaacctgggaggcggaggctgcagtgagccgagacctcgccactgtactccagcctaggcgatagagcgagagtccatctcaaacaaaaaagaaaagaaaagaaaagaaaaaagaaaaggtacagtaaaaatacagtattataatcttacaggacctctgtcatatgtgtagttcttattggccaaaacgttgttatgtggcacatgactgtcctgtgataaagtaagatgccaacatcagggaaagggtgagggggatgtggtaactctttgtaccatctttccaagtttccagtaaatttaaaattactccaaaataaaaagtttagggtgaaaaaagaaggaaaggaaatgaaaatgtccacctataggagactggataaatcgtggtatagttattcaatggagtattatgcagcagtgaaaatgagtcaatttccattacacacagcaacacagatgtgctcccatttacatataacatttcaacagggtgtggtgaatcgtgtctgtaatcccagcactttgggaggccgagccaggaggcatcacttgaggccaggagttcaagaccagcctggaccacatggcaagaaaaattaaaaataaactgggcatggtggcgtgatctgcctgtagttccagcttctcaggaggcagaggtgagaggaacacttgagccctggaggtcgaggttgcagtgagccatgatcccaccgctgcactccagcctgggcaacacagtgagactctgtctcaaaaataaatatcatttcaaaacacaggcaaagctaaacaataagcagtttagggacatagatagaattattattttttttaaagtaagggagccaggcatggtggcacacacctgtggtcccagatactcgggaggctgaggcaggaggatcacttgggaccaggagttctgggctgtagtacactatgccaatgcagggtccacgctaagtttggcatcagtttggtggcctcctgagagcgggggatcaccaggttgcctaaggaggggtgaactggcccatgttggaaatggagcaggtcaaaactcctgtgttaatcactggtgggatcatgcctgtgcatagccactgcactccatcctgggcaacatagcaagaccctatctcttaaaaaaagaaaaaactagccagatgtggtggcatgtgcctatagtcccagctactcaggaggctgaggtgggaggatcgcatgagcccaggagtccgaggttgcagtgaactatgattgtaccactggactccagcctggtctacaaaatgtgaccttatctctcataaacaaaacaaaacaaaataaaatggaagcccctgagaagctaagggaaaagatgctcttcagaaggagaggggtacaccctggccgcaggttcctcttctctgccaaccttttcctgttgtctccatctattcactttgttcagcattgctttctgtgatttgtcttttgaatcacgtccttcaagcattctcacactcctcactcctctcggcctctaaaggactcacctggccaaactccagccatcctcttctctgtgccagccgagcccagcagaaggaaaccacccagccagcccaacgggttttacctgaatcagagaaatcacaggcctcagacaggcgcagggcactctctatgtgtctctggtgtgcttacatttcccccctgccctccagcccatgactaggtcccacacttccctgtgcacatagaagccatcagaagggaacccccttgtcatctgtccctgtgattccctctctcaaggattggggtctccctccctccttccttccttccttctttccttccttccttccttccttccctgcctcccgcccttccttccttccttctctccctccctccctgccttccttccttccttcttcccttccacctccctccttctctccctctttcctcttccattgaagtttctcctcctctcctcctcctcccccctcctcctcttcctcctccttttcctcctcccctcctcctcctcttcctctgcctgtcctcctcctcccctcctcttcatcctccccttgtcctcctcctcttcctttccccctcctcctcctcttccttccccctcctcctcccctcctccttccctcctcttcctctcctcctcctcttcctcctgccctcccccctctttctcctccctcctcttcatttcctcctcttctcctctttctcttcctgtctcctatatcattcatcatctctctctccttctgccaaatcatgcccatcactatcctcaaatgctcctgcctcttccattcattttttaaaaagaattcctcccttgagggaaccgagagataagagagactgtagccacaaatcaaccacatgcaacccaaggactttggatgctgagtcgaacagaccaatgttttgtttcgttttgtttttaaattatcagacaagtagagaaatctgaactctgactgcctattcgatgataggaaagaattatggtgcattttttagatggatcacgggattgtggttatatttctataaacaaaccttatctccagagatatgaaatgaataatctgtacatgaaatgatgtgatgtctgggatgtgttttaaaactatctagtggggtgagggtggggccaatgagagacggtagaaatgaaacagcattggccatgagttgataattggtgaggcccagtgaccggcatgtggagttaatcatactcttttatttttatatatatttgaaaatgggcttatttaaaagtgatgtaaaaattcctctctttggctggctgcagtggctcacacctgtaatcccagcacttggggaggccaaggtgggcagatcacctaaggttgggagtttgagaccagcctgatcaacgtggagaaactctgtctctactaaaaatacaaaattagccaggcgtgctggtgcatgcctgtaatcccagctactggggaggctgaagcaggagaattgcttgaacctgggaggtggaggttgcagtgagccaagatcacaccactgcactccagcttgggtgacagagactctgtctcataaataaataaataaataaataaataaataaataaataaataaaatacaacaaaatcacacaataaaatccaacatccctcgccacatcctgtaaatctggtctgtccaccctctggcctcacctccactctctgttcaggcttgctctcctccaagcacaccaacagagcaagttcctatatgctgttccctctttccagaagattcacctggcttcttccctcccctcctcagtctatgctcaattgtcccctgctgggaggttccttccactgactattctctccagtttattttcttcgggaagctcatctctacctgacatcacgtcacacctggttgtttgttgatcgtcagtctctctgctagaatgtaagcttcatgctggcaggggctttgtctgttttgttgcctagaacagtgcctggcacgcagtagataattaattttttttttttttttagagatggcattttactctgttgcccaggctggtctgaaactcctgagctcaagcgatccccccacctcagcctcccaaagtgtgtgagccactgcacccagctaataattaatactttttaattttttttgagacagggtctcactctgtggcccaggctggagtgcagtggcacaatcaaagctcactgcagccttgacctccccaggttctggtgattctcccagctcagcctcctgagtagatgggactacaggcatgcaccaccatacccagctaatgtttgtgttttttgtagagacagggtttcgccatgttgcccaggctaatctcaaactcctgggctcaagcaatctacccaccttggcctcccaaatattacttttaaaataaatgaatttaaatctgccagtctctgacaaaatcttatttggccacagttgctttggatgtaaaaacatgcataagtaaggctgggtgcagtggatttacccagacagagcattacccagcatttacccagacagagccggacacgatggcttatacctgtaatcccagcattctgggaggctgaggtgggtggatcaattgaagtcaggagttcaagaccagcctggccagcatggtgaaaccctgtctctattaaaaatacaaaaattagctgggtgtggtggcttgcgcctgtaattccacctactcaggatgctgaggcacgaaaatcgcttgaacccaggaggtggaggttgcaaggttgcagtgagctgagatcgcaccactacattccagcctgggtgacagagtgagactctgtctcaaaaaaaaaaagatgtggctgggcatggtggctcatgcctgtaatcccagcattttaggaggccgaggtgggcagatcactttaggtcaggagttcaagactcaggagtttgagactagcctggccaacaaagtgaaaccccatctctatccaaaatacaaaaattagctgggtgtggtggcacacacctgtaatcccagatactcgggaagcggaggcatgagaattacttgaacccaggaggcggaggttgcagtgagctgagattgtgccactgcactccagcctgggtggcagagtgagactctgtcttaaaaaaaataaaaacggctgggcacggtggctcacgcctgtaatcccagcactttgggaggccgaggcgggcggatcacgaagtcaggagatcgagaccatccttgctaacacagtgaaaccctgtctctactaaaaatacaaaaaattagccgggcgtggtggtgggcgcttgtagtcccagctactcaggaggctgaggcgggagaatggcgtgaacctgggaggcggagcttgcagtgagctgagattgcaccaccgcactccagcctgggcaacagagcaagactccgtctcaaaataaaaattaaaattaaaattaaaaaataaaaaataaaaacatacataaataaaacaccgtcttccatcttcagctcagtctacatggtttctgtcataccactcctctatttgtcatgtccaatggtgggggagatcatctcaatcttgatgaaaccactcctatacattttataaagttaatcaggacagggagaaatgaaaataaacccagctggctgggcgtggtggctcacgcttgtaatcccagcgctttgggaggcccaggcgggaggatcacctgaggtcaggagttcgagattagcctggccaacgtataaaaccccgtctctactaaaaatacaaaaattagcctggtgtggtggcatgtgcctgtagtcccagctactcgggaggctgaggcaggagaatcgcttgaacctaggaggcagaggtcacagtgagccaaaattgtgtcactgcactccagcctgggtgacagagtgagactctgtctcaaaaaagaaaaaaaagaaaagaaaaaaaagaaaaggaaaaaaaagaaaagaggcccatcttccgcacactcagcattaattgtgaggccagctggctctctgacctgtttccccacaattgttttgtgcctattgtcctaaaatcatgtagaccttgttaccagattctacttcccctcaactgctctgtaaatgacaacttaaacatgataaaacgttaagttttctttttgagatgttccctcaggtcctgcatgctgatgaaatgactctgccagctgatctgagggaccccatgagatgctgactcaccaaagcatgcgatttccacgtttgggattatttcactcctttccctgaccaatcaacagggccaattctccagtcctttgtccttcatgatcacctcaaaaatcccagcccagaactcctcgggaagacgaattgagggtctgcttccctctcctccctcagtgccccacaatcattagatcctttctctgctgcaaaccctgctgtctctgtgcaattggtctgttgctgcacagcaggcatacaaacctgttgttcctgtaacactgagggagggtatggaacccaggggttgggggactgaaagggcctcatatgggaggggacaggttcttacgagaccgtcggtagcaggggtcttcattggccctgtccttcctaaagcagcctcctctaagctgacttgatgccacacaagtctgttctcctcctaggaagaagtcgctgttggcaacatccccacccagccccactctcctatcccccagctgctagtggctcccagctgtccctccaaggcaagtttccttcagcaaaaccacctctcctgggaggctacacctggtaacccccagccactggccgactgaccagcctgggcaacatagcaagaccttatctctactaaaattttttttgaaagttaacaaggcatggtgacatgtgcctgtagtcctagctacttgggaggctgaggcaggaggatcccttgagcccaggagttcgaggatgcagtgagccacgattatgccactgcactccagcctcagtgacagagtgaaaccctgtttctttttttgtttttgtttttttagacggggtctcattctgtcacccaggctggagtgcagtggcatgatctcggctcactgcagcctctgcctcccaggctcaggcgatcctctcacctcggcctcctgagtagctgggactacaggctcgtgacaccatgtctggctaattttttttacttttattttttatttttggtagagacagggtttcaccatgttgcccaggctggtcttgaactcctgaactgaagcaatccacctgccttggcctcccaaagtgctgggattacaggcatgagccactgtgcccagccaagagtgagaccctgttattaaaaaaaaattaaaaaaagaaaattaagggagagggagagaaggaaaaagaaataattttggatttcctttgtcattcaataagtactaaactatgaggtgttggggtggccatatttctatatctgatcttagcatctcccttttaccagttagctacagctgtgtaacaaatcaccaaaaaacatagtggcataaaataacaaccatattttttttttctcatgtgtatttgagtcctcaagattatcctggtgacccgggccaggctcagatgaccttggctgggctcactcatgcatctgtggtcctctggtgggttgaccagagactggctggtttggaatgccttcagctgggatgactcagttcttccctacctttctctcacattcctccagcaagctggcccacacatgttctcatggcgaagacagaggagcaagagatagaagagaaatacgcaaagcccaaggcctgttcatgaagctggtacatttttgttcttttttttgtttgtttgttttgttttggagacagagtctcaccgtgtcacccaggctggagtgcaatggtgtgatcttggctcactgcaacctctgcctcctgggttcaagcaattctcctgcttcagcctcccaagtagctgagattatagctgtgtgccaccacacctggctaatttttgtatttttagtagagacggggttttgccatgttggccaggctggtctccaactcctgacctcaagtgatccgcctgcatcagcctcccgaagtgctgggattacaggcgcgagccaccacgcccggcctgggcttctactttctcactcctcttcccagtcagtcaccattctacctttttgtgggtcagtcctcttgtttccatccccacgcctccacactggtccaggccaccatcacttctcgcctggaccgacaatgacaatgacacataagggttggaggtggaggttatggggtgggggttggccctgggtttcaatcctggttctgctgtgtagtagctgagtgccctcaggagagtgactttacctctctgtgcctcagtttcctcctccataaagtggggatgattagctgggcatagtggtgcgtgcttgtagtcttagctactcaggagtctgaggcgggaggatcccttgagcccaggaatttgaggttgcagtgagctatgattgcgccactgcactccagcctaagtgacaaagcaagaaactgcctaaaaaaaaaaaaaaataggccaggcatgatggctcacacctgtattccaagagctttgaaagacccaggtggggccaggtgcagtggctcacacctataatcccagcactttgggaggctgacacgggtggatcacctgaggtcaggagttcgagaccagcatgaccaacatggtgaaaccccgcctctactaaaaacacaaaaaattagccgggcatggtggcaggtgcctgtagtcccagctacttaggaggctgatgcaggaggattgcttgagcccaggaggctgaggtgcagtgagctatgattgaaccactgcacattccagcctgggtgacaaagtgagaccctgtctgtaaaataaaagtaaaaataaatatgccaggtgcaatggctcatgcctgtaatcccagcactttgggggactgagatgggtggatcacttgaggtcaggagtttgagaccagcctggcccacataagtgaaaccctgtctctactaaaatatacaaaaattagccagatgtggtggtgcaaacctgtactcccagctactcgagagtctgaggcaccagaatcatttgaacctgggaggcagaggttgccatgagctgagcctgcactccaacctgggtgacagagtgagagtgtgtctgaaaataaataaataaataaaataaaaagaacagtgattggcacacagttgtcacgccataaatgtatttactgtttgcaataaggagaggtttgttctcaggtaacaaaacatacactagagctataatcattaacacggtgtggtgtggggcacaaaaacccacaagtaggccaggcatggtggcttccactgtaatcccagcactttgggaggccaaggcaggcagatctcttgaggccaggagttcgaggccagcacggcgaaaaccacatctctaccaaaaatacaaacattagcaggttgtgatagtgagtgcctgtagtcccagctacttgggaggctaaggcatgagcatcgcttgaacccaggagacagaggttgcagtaagctgagattgtgccactgcactccagcctgggtgtcagagggaaactctgtctcaaaataaagaaataaagaaatggaaataaaaataataaagtggggatgaggataacacctacttgtaaggttgtttcttgaggggatccagaaagtaaccatatctgaagaactcaggactgtcctgggttgtgtaattgactggaataaatggcggatgggatggtgttgggaaattgattccgactgatgggcaaggtttgtgctcagcacatccctggtctcacaccaatcctaggagttagtcccatttttctgacgcagtagttgaggcttaaagaagttcagtcacatgcccaaggccacagttcctgaaaagctgggccaagacttgaactgagatctttctgattcctaagtttctctttcctattgtaagcaccggctttctccctggtctccctgcttgccctcttattccccctccgatcttttcttcccatgtcagccaaagggattccaggaaagggcaaagatgattaagttttttccttcctaagatccttcggccatgtgacttgatgcaatgtatgatcctgtgttgaatcctgggctggggaaaacattgctataaaggattttattgagacaaacagatttgaatttgtggattaaacaattgtattattgtatcaacgtttcatttcctgtttctgattcttgttctggattttttaaagagcatgtctttgtttttagtaacgtcatgctgaaggatttagggatcaagggacacgacgtcttccactgcctctcaaatgttcagaaaagaaacatacagcagaggtggccaaatgttactgacttgcgaatccaggaaagatctacttacctttcttgctagttttctgtaagcttgaaattattgctggtaaaaaacaaaacaacaacaaagcaaaccttcattccactcctaggtagatatccaagagaaatgaaaacatatattgacacaaaaaacctgttatgggtgggtgtggtggctcacacctgtaagcccagcactttgggaggctgaggctggtcaatcagttgacatcaagagtttgagaccagatggccaacatggtgaaaccctgtctgtactaaaaatacaaaaaataaaaattagccaggtgtggttgcgggcgcctgtaatcccagctactcgtgagactgaggcaggagaatcacttgaacccaggaggtggaggttgcagtgagccgagattgcaccactgcactccagcctaggagacagagcgagactccgtctcaaaataaatataaataaataaaaaaataggtgttcaaacaataacttgtacataaatgtccatagcaacactattcacaacagccaaaacaacactattcgcaacagccaaaagagagaaacgtccatcaacaagtgaactgataagtgaaatgtggtctatccatacaatggaatgttattcagccataaaaaggaatgaagtacttactgatactttttttttcttttttttttttttttgagatggaatttccctcttgttgcccaggctggagtgtaatggcacgatctcggctcactgcaacctccgcctcctgggttcaagcaattctcctgcctcagcctcccgagtagctgggattacaggcatgcgccaccacaccaggctaattttgtatttgtagtagagatggtgtttccccatgttggtcagactggtctcgaactgacctgaggtgatctgcccgccttggcctcccaaagtgctgggattacaggtgtgagccactgcgcctggccaaagtactgctacttgaatggatgaaccttgagaacattatgctaactgaaggaagcctgtcataagggactacacactgtatgactatttttatgaaatatccagaacagacaagtccatggagacagaaagtagattgatagttgcccagacctgggggacgggagataggaagcgactactaacgggccagcggttttgtgctgggatactgagatgttctgaagctacatagtgatgatgtttgcacagcactgggaatatatgaaaaaccattgaattatacattttaaaatgatgaattttgagccaggtacagtggtgtgtgcttgtaatcccagctactttggaggctgaggctggaagacggccggagcccaggaattcaagaccagtctgggcaacatagcaagatcctgtctctactaaaaaaaattaaaaattggctgggcgcagtagctcacgcctgtaatcccagcactttgggaggccaagcggggccagcctgaccaacatggagaaaccccatctctactaaaaatacaaaattagccgagcatggtggtgcatgcctgtaatcccagttactcgggaggctgaggcaggagaattgagaacttgggagccggaggttgcggggagccgagatcatgccattgcactccagcctcggcaacaagagcgaaactctgtcccccaaaaaataaataaataaataaggagttttatggtaggcaaattatatcagaatttttcttttttttttttttgagactgagtcttgctctgttgcccaggttgaagggcagtggtgtgatctcagtcaccaaaacttctgtctcctgggttaaagtgattctcctgcctcagcctcccaagtagctggaactacaggcacccactaccatgcccagctaatattttgtgtttttagtagagatggggcttcactatgttggccaggctggtctcaaactcctgacctcaggtgatcctccctcctcggcctcccaaattgctgggattacaagcatgagccaccgcacatggccgaattatgtaacaattaaaaaaaacagcaaacactttaatgactgtagattacctctggggtcaaaccccaaatccctggtgtacctgcaagtctgccctgtccctcagaccatctcagccaaactgctgactttctagccacctgcctttcctccttccccagtgctaggcctttgcatctcctcttcccttccaccctcatctgacaactctattcatctcacaagtcttagctgactggccaggagcggaggctcacacctgtaattccaacacttcaggaggccaagaccagagggttgcttgagcccaggagttcaagaccagcctgggcaacatggtgaaaccccatctctacaaaacatacaaaaaacttagccaggtatggtggcacgcatctgtagtcccagttattcgggaggctgaagtgggaggatcacctaagcccaggaagtcaaggctgcagtgagccatgatcataccactacactccagcctgggcgacagactgggactctgtctcaaaattaaaattaaaattaaattaggccaggtgtgatggctcatgtctgtaatctcagcactttgggaggccaaagtggtcagttcacttgaggtcaggagttcaagaccagcctggccaacatggtctctactaaagatacaaaaattagctgggcgttgtggcaggcacctgtaatcccagctactcgggagactgaggcaggagaatggtgtgaacccgagaggtggagtttgcagtgagccgagatagcgccactgcactccagcctgggcaacagagcgagactccgtctcaaaaaaaaaaaaaaaaaaaattaaacaacctggagcttgagatcggcactggaagtagggaacaggcttggctcagtggcttacacctgtaatcccatcccagcactttgggaggccaagggggacggatcatttgagcttcagagttcaagaccagcttggccaaaatggtgaaactgtctctactaaaaatacaaaaaattagccaggtgtggtggtgggtgcctgtaatcccagctacttgggagggaggctgaggcatgagaatcacttgaaccccggaggcggaggttgcagtgagcagaaatcacaccactgcactccagcctgggtgacacagggagactccatctcaaaaaaaaaaaaaaaaaaaaaagagctcagtaactcaggcctataatcccagcactttgggaggccaaggcgggcagatgacctggggtcaagagttccagaccagcctggccaacatggcgaaaccccatctctactaaaaatacaaaaatgacttggtcgtggtggcgggcgcctgtaatcccagctacctgggagactgaggcagaagaatcgcttgaacccgggaggcagaggttgctgtgagctgagattgtgccatagcactccagcctgggcaactcttttgagacagagcgagactctgtctcaaaaaaaaaaaagaagtggggggcaatcttgtgggactcagccttcaacctgtgggatctgatgctgtctccaggtagatagtgtcagaagtgaattgaattggaggacaggctggtgtcccctggggggagaagatccccctcatatctagtgacagagcgtgttgtgagtgtgtcgtgggacaaactgtttgtgtattcctctattctcagaattccctgcactgtcttttcctaacaattcctctttatcctcctcctcctccaggaagccttcccaaaccccaggctgggtcaggtgcctgctctgagctcccacatccccaggactcactccccctatccactttagggagaagtctgtaacctccacagacccgagagttccacgaggtagaccccagggtctcccagtaaccgccacagagcagataccgacaaacactcattgcattgacctaacctcactccaccaccatctccccagacctctcggttcttgccttccaccagcccctcaccaaccatttttggctcttctccttgcctatgctgctgccatatgtatgattttttattttacttaatttaatttaatttatttatttaaggtggagtcttactctgtcacctaggctggaatgcagtggggccatcttggctcactgcaaccttcacctcccaggttcaagcgattctcctgcctcagcctccccaatagctgagactacaggcacacaccaccacacccagctaatttttttctctctcttttttttttttttgttgttgttgagacggagtcttgctctgttgcccacactggagtgcagtggtgtgatctcggctcactgcaagctccacctcccgggttcacaccattctcctgcctcagcctcccaagtagctgggactacaggcgcctgccaccacgcccggctaattttgttttatatttttagtagagacggggtttcactgtgttagcaagtatggtctcgatctcctgacctcgtgatccgcccacctcagcctcccaaagtgctgggattacaggagtgagacaccgtgcccagccacgcccagctattttttttttttttttttttgtatttttagtagagacgggattttgccatgttgtccaggctgatctcgaactcctgatctcaagtgatccacctgtctcagcatcccaaagtgctgggattataggtgtgagccaccgtgcctggtctgtattattttttatttttatttatttaattattattatttgtttttgagatgaagtttcactcttgttacccaggctggagtgcaatggtgtgatcttggctcaccacaaccttcgcctcccaggttcaagcagttctcctgcctcagcctcccaagtagctgggattacagggatgcactaccacgatcggctaattttgtatttttagtagagatggggtttcatcatgtgggtcagggtggtatccaactcctgacttcaggtgatccacccacctcggcctcccaaagtgctgggattacaggtgtgagccatcacacccagccttatttcccacgccgagacagagtcttgctctgtcgcccaggctagagtgcagtggcaacatctcgactcactgcaaactccgcctcccgggttcaagcaattctcctgcctcagcctcccgaggagctgggattgcaggcatgtgctaccaggcccagctaatttttgtgtttttagtagagacggggtttcaccatgttggccaggctggtctcgaactcctgaccccgtgatctgcctgcctctgccatccaaagtgctgggataacaggcgtgagctactgagcccaatcaatttttaaaaatcatatatactcaacacctttgcttttaaaaaacccttaagcattttttaaaatacaattttgttttatttcagatggagtcttgctgttgtcggcctgggctggagtgcaatggcgcgatctcagctcactgcaacctctgcctcctgggttccagcaattctcctgcctcaccctcccgagtagctgagattacaggcgcctgccaccacacccggctaatttttgcatttttagtagagacagggtttcaccatgttggccaggctggtcttgaactcctgacctcaggcgatccactcaccttggcctcccaaagggctgggattccaactatgagccaccgagcccggcctattttttcctcttttgatcgtgatgattctagtgggtgtgaggttgtatctcattgtggttttgacttccatttccctaatactgatgactgagcatcctttcctgtgtttcttggccatttcctcaccaccttctgcaagctgacctcagccctcaccacctcactgaaccatcatttccaccttcaccagtccagtggtttatcttaatttcccttcttttctctctcagcaactttggacacttcctccctcgccagccattcttggtcttcgtcttccttttctggagagaaatgtaagaacttaggccagttagttaacttctctgtgcctcggttcttcatctgtgaaatgaagatgacaacagctcctacttcaaggttgctgtgaagattccatcagctaatgtatgtaaagggctcagaagtgttgggaggccttggccaggcgcggtggctcacgcctgtaattccagcactttgggaggccgaggcgggtggatcacgaggtcaggagttcaagaccagcctggccaagatggtgaaaccctgtctctactaaaaatacaaaaaattagccgggtgtggcagcgggcgcctgtaatcccagctactcgggaggctgaggcagagaattgcttgaacctgggaggtgcaggttgcagtgatcgaagatcgtgccactgcactccagccttggcaacagaccaagactccgtctcaaaaaaaaagaagtgttggaaggcccaggcaggcgcatcattggagcccaggagtttgagtccagtctgggcaacatggtgaaaccctgtctctacaaaaaatacaaaaattagtcaggtgtggtggtgtgtgcctttattcccagctagccaggaggctgaggtaggaggattgcttgaggccaaggggttgaggctgcagtgaactatgattgcctgtagtcccagctactcgggagactgaggcaggagaattgatggaacctgggaggtggaggttgcagtgagctgagatcgcgccactgcactccagcctgggtgacagacggagactctgtctcaaaaaaataaataaataggccaggcgtggtggctcacgcctgtaatgccagcactttaggaggctgagttggggagatcacaaggtcagaagatcgagaccatcctggccaacatggtgaaaccctgtctctaccgaaaatacaaaaattaggtgggtgtggtggctcatgcctgtagtcccagctactctggaagctgaggcaggagaattgcttgaacccaggaggcggaggttgcagtgagccaaggttgcgtcactgcactccagcatggcgacagtgagactctgtctcaaaataataaaaataaataaataaatataattttaggaaaagtcaccagaaattcaaaacaaaaacaaactccgttgcagaaatcggatgtgaaaattgttcactttcattcagaatctgcgggtcggccaggcgcagtggctcatgcctgtaatcccagcactttgggaggctaaggcaggcggatcatgaggtcaggagatagagaccatcctggctagcacagtgaaaccccgtctctactaaaaacacaaaaaattagccaggtgtggtgatgggcgcctgtagtcccagctactccggaggctgaggcaggagaatggcgtgaacccgggaggcagagcttgcagtgagccgagatcgtgccactgcactccagcctgggccacagagtgagactctgtctcaaaaaaaaaaaaaaaaaaaaaaaaatctgcgggctgaagccaggtgcggtggctcatgcctgtaatcccagcactttgggaggctgaggtgggtggataacaagttcaagagatcaagaccatcctggccaacatggtgaaaccccgtctctactaaaaatacaaaaattagctgggtgtggtggcacacacctgtactcccagctacttgggaggctgaggcaggagaataacttgaaaccaggaggcagaggttgcagtgagctgagatcacaccacggcactccagcctggcgacagagcaagactctgtctcaaaaaaaaaaaaaaaaaaaaaaaagaataaacagaatctgcttaagattcttatatctttagcttttaaaacaatacatctaaagacagaaaacgtttacatggcacagtgtaatgtggtgattaagagtatgaattttggagcaggtgcagtggctcacatctgtaatcccagcactttgggaggccaaggcaggaggatctcttgagcccatgtgttcgagaccagcctgggaaacaggacaagacctcatctctacagaaaaataaaaatagattagccaagcatggtggtggcacctgtggtcccagccactgtggaggctgaggttggaggatcacttggacccaggaagtcaagtggtgaacacgttgttgcactccagtcagcgagatccctgctagaaaaaaaaaagtataaattttggaacagggctgcaaatccctgtgccccctgactctgacaattttgcaacttctctatgactcagtttccgtatcagcaggaggtgatattagcatatcctacctgctaggattgttggaggcattcaatgagagcatccaagtacagaaagaagctcggttaagcattacttataactacattgtaaatccccctctagccatgggtgacttttatagccatctgaacaatgtttcacaaaccctgtagtaaaaaggggatgatccgcctgtctcggccccgcaaagtgcaggattacaggtgtgagccaccgcactcagccgagatctgttaacagactccaaatctcgacttagtctcattgctgcaagcggtctactcattctctcctccagatcttcgggaacagagtaataataaaaatcaaaacccagccagctcttcctctgtcagtggtgttgaccagcagagaccgcttcccttcttaaaggggcctttcctagtttcgactttctcttctctttcctaagatggcctggtgcgtttctcctgtcaccctcccccaagcatagccaaggaagcggcccctcccacatagttggaatgttaaatatctcagtgatgactacaaggcttaaagcaacaaataaataaagccactcttgagtcagaatattttatttggtggtgcatgagtaacaatacccgataaatgaagacacattcttagcgtgttctctatcccccaaacgctgcggggtgcaggggctgcgggggctgcaggtgggaggtccacagcctctagggcaggagctctagggcaagagcaggagcaaagggacatgtggatgaaaacgggaaattctcagaatttgtgtatttattggattttttgtgtgtatttctttgaatgtttttgtgtatttgatttttttgtgtgtgcacgtatttgaatattttgtgtgtatttttttgaataggtgacactaggctcaaactttacaaaggtagaaaaagacctaacatccacccacccctgtttccccacggaaaactgctgtgaccagtttgctttttttttttttttccctagacaaagtctcgctctgtcacccaggctggagtgcagtagcggctcaccgcaacctccgcctcccaggatcaagcgattctccttgctcagcctcccgagtagctgggattacaggcgcgcgccaccatgcccggctaattttttgtatttttagtagaaatggggttttgccatgttggccagtctggtctcgaactcctgacctcatgtgatccgcccgcctcggcctcccaaagacctgggattacaggcgtgagccaccgcgccctgccgcagttcgcttctgcttttcaagatattctgtgtatttaacaagcaaaagcttgtattttttcatctccaccttttacatttttatacctttttttttctcctctcctaccttgtcaggctacatagctcataccgtgtcagttcaagtatcccttcctcgttttacggtgactccgcatcccattgcgggccgcaccactgcttatctgagtcccccatcgatggacaactaggttgtttctggtctttttttttttttcccacaaatttttacgagaacaacaacaaaaaaaacaatgctactcaacctcaccccttggttagtgtttgtcaaaaaacggacaggcagaagccccaacctgcgccccccaacgcccgactctccgcatccgccgagggtaccccagctccagggatcgcggtgctcagggaccgcgcgtccaggactggccctgcctcccagaagctgtcaggcggcggccgtggcccgctgtagccccgccccgtggcccgcccgcagtaggcccgattcaaatctggccaatgatagtgtgtaaacaaacccaggccccgcctcccgacgaataatcccccgaccggcgagaggcccatttaacccgatggggtttggggttgggacggtgatggagtcgtggctccgcccccagacctgggccaataggcggctgggctccgcccccggcacttgccgcgctgaggacccgaggcagggctgggcgcgcagttgcctgatttcgtggcggctcgcagtctgggcgctccgggcgctcggcgcgggcgggcagggccaggagctggggcggcgcactccgcggtcccagccgcatttgaagggagcggtcagagggcggagatcgccccggcatcaatgccctctcatcccccactttatttccaccgcctagctgctaaaatccggacccggaaacgtctccaatgggaacttgttcccctcgcccctatttaacagaacctggaggggacgcaggggtgtttttggattgggcaaggctttcatttctttcccctggttcttacatgcatacgggaaaatgcacgtatcttgtgcgccgctctacagaaaactaaaactccatgtggcaccagcagcctcccaggtcgagaaacaacttgggttggagaaattttcttttcgtttctttgcttttctttctttctttctttctttttgagacggagtttcgctcttgtcgcccaagctggagtgcaatggcgcgatctcggctcacccacaacctccgcctcccgggttcaagcgattctcctgtctcagcctcccgagtagctgggattacaggcatgcgccaccacgccttgctaatttttgtatttctagtagagacggggtttctccatgttggtcaggctggtctcgaactcccgacctcaggtaatcctcccgccttggcctcccaaagtgctgggattacagacgtgagctaccgcgcctggcctgaacattgtcataataaaatgtttggggacaggggcagatttgggtgcctgacgatacactcccattgaagagatgagaaaatggaggagctggagaagtgacttgccctaggttcatctggtgactcagccacagaacacctgggtgtactgatttagtccccaccctgcctggctggccttggggacaagtcgctgaacctgtctgggtctgactgcctaactcagtgcttaacctaggactcataacttgcgcctgattctcaaatagaaggggcgtgtcactcccgaaggacagcaggtctctttcgatctgggcccatattgatccccaacactggtctttggtcatccctttggctgcctctgaccttccccactgattctagaacagtgtggaccacactcactcattaactctgaaacttggacaggctttccaggatgtcaggggacagacaggacagagcaggaaaaacagacgtttgctctcccagggcagggattgccagggaatcaatgccctttgatccacccccttagttccactgcctggtagctaaaacccagatgctgtaccaagggatcgtttaaaaaattccatttgagaatcatatgcaagttatgagtcccccattaagaactgagttggtgcctgtaatcccaccactttgggaggccaagatggggggatcacttgaggccaagagttcgagaccagcctggccaatatgatgaaaccctgtctctactaaaaatacaaaaactagctgggcatggtggcgggtgcctgtaatcccagctgcttggaatcgcttcaacccttggaggcgcgcgttgcagtgagctgagattgcgccactgcactccagcttgcgtgactgtcaagaaagaaagaaagagaaagaaagatagagaaagagaaaggaaggaagggtgaggtggctcatgcctgtaatcccagaactttgggaggccaaggctggcagatgacaaggtcaggagttcaacaccagcctgaccaatatggtgaaaacccgtctctactaaaaatacaaaaaattagctgggcgtggtggtatgcgcgcatctgtagtcccagctacttgggaggctgaggcaggagaattgcttgaacctgggagatggaggttgcagtgagtcaagattgagccactgcactccatcctgggcgacagagcgagactccatcatctaaaaaaagaaagaaagaacgagagagagagagagagagaaagggctgggcacggtggctcacgcttgtaatcccaggactttgggaggctgaaggcaggtggatcacttgaggtcaggagttcaaaaccagcctgaccaacatggtgaaactccgtctgtactgaaaaaaataaaaataaacatttgctgggcatggtggtgcatacctataatcccagctacttgggaggctgaggcaggagaattgcttgaacctgggaggcggaggttgcagtgagccgagatcgcaccattgcactccagcctgggcaacaagagtgaaactccatctcagaaaaaaagaagagaggatagagagagaagggaaggaaggaaggaggaaagagagaaagaaaaaggagggaaaaagagaaagaaagaaagagaagaaaagaaaagaaaaaagaaaaagaaagaagtaactgagttgagcagtcagacccagacaggttcagtgacttgtcccagggtcactcaggcagggtggggactaatggctatcagccatggctaggcatggggctggcctctttttatctttttttgagacggagttttgctctcgttgcccaggctggagtgctatggcgcgatcttggctcactgcaacctccggcttccggattcaaacaattctctgtcctcagcctcctgagtagctgggattacgggcatgtgccatgatgcccagctaattttgtatttttggtagagacggggtttctccatgttggtcaggctggtctcaaactcccgacttcgggtggtccacctgcctcagcgtcccaaagtgttgggattacaggcgtgagacaccgtgcccggcctgagtttttttgtttttttgagacggaatctccctctgtcacccaggctagagtgcagtggcgcgatctcagctcactgcaacctccctcttttgggttcaagcgattctcctccctcagccttccaagtagctggtactacaggtgcgcaccaccacgcccagctaattttttctatttttgtagagatggggtttcgccgtgttgcccaggctggtctcgaactcctgagctctggcaatctgcccacctcagcctcccaaagtgctagggttacgggcgtgagccactgcacggggccagggctggcttcttgttggtgtcctctgcaccctaccagagccattccaagtggcatggccccaagaccatctccctaagaggtcaggtgtgtgtatgaggtgggtggatgttgttaatatctattcagcaaacttttattgagcatttactaagcaccaagcactgttttaggggcagtggatattctacaatgtaccaaaggaacctgggaactgccaaaaagggcatgaccaagggaggtaaactgaggctcgcaaaccgaggctaattaagcgacttatttgcttacttgcttgttggctgtgttgcctaatagattgtgagttgtgtgggaggcaaatagattgtgagttgtgtgggaggcaaatagattgtgagttgtgtgggaggcaggaacccgggtggtgttggtcaccacaggatccttgacacactagatactaaaaaaatatgaatgaatagactctgacgaagtctccagtgagtcccctagttctgagtcccccggggctggcagctatgacagaaacacaagtgctacacttcaggtcccagtgtacagtgacggcttcagatgagggctgcgtctcactttgtgggtgcgtgactgggcaaaacacttcccttctcggagccaattgagttttctacactgtatgatgggggtaactaaaggtctctcccctgtgggcagttctcatcagaaactgtgttcaccacccagttaacactctaaaagtgtagctccatcagtggctgtggaagtgcagagttaggaagactcagactatacaaacataaagtaaaaaaagtgtatactgctgcttctcagagggtccacacacctccagtgggtggtggatgatcactgcttgtttttgtttttttgtttgcttgtttgttttgtttttgagatggagtcttacttttgttgcccaggctggagtgcaatggcgtgatctcagctcactgcaacctccgcctcccaggttcaagcgattctcctgcctcagcctccccagtagctgggattacaggcgtcttctaccacgcccagctactttttgcatttttgtagagatgggggggtttcaccatgttggccaggctggtctcgaactcctgacttcaggtgatccacctgcctcggcctcccaaagtgctgggattacaggcgtgagccaccgcgcccggacttgtttttgtttttgtttgagacggagtctcactctcgccgaggctggagtgcagtggcgtgatcctggctcactgcaacctccgcctgccgggttcaagcaattctcctgcctcagcctccagagtagctgggattataggtgtgcgccaccatgcctggctaatttcttttgtgttattattattatttttttgagacagagtcttgggctgttgccaggcgagtgcagtggcgcaatctgagctcactgcaaccaccacctcccgggttcaagtgattctcctgcctcagcctcctgagtagctgggaacacaggcacatgccaccacgcctggctaatttttgtatttttagtagagacggggtttcaccatgttggccaggctggtctcaaactcctgacttcaggtgatccacctgcctcggcctcccaaaatgctgagattacaggcatgagccaccgtgcccggcctgtttgtttgtttgttttgagacagactcttgctctgttgcccaggctggagtgcagtggcgcaatcttggctcactgcagcctcgacctctggtgttcaagcaattctcgtgcctcagcatacgccaccatgccgggctgatttttgtatttttaatacattagattttgtaatttttgtattttcgctgcgttgaacaagatgctctggaacccctcacctcaagtgatctgcctgccttagcctcccaaagtgctgggattatgggtgtgagcccctacacacctgggccatggaggcttttttttcttttattgcatgatgcctaggtttggggtacgaatgagcccgtcacctaggtactgagcatagtacctgaaagttagttttgttttgtctttttttttgagacagagtctcactctgtcgcccaggctggagtgcaatggcatggtctcggctcactgcaacctctgtgtcccgggttcaagcgattctcccacttcagcctcccaagtagctgggactacaggcatatgccaccatgcctggctaagttttgtatttttagtagagacagggtttcactatgttggcgaggctggtcttgaactcctgatctcgtgttcctcctgcctcggcctcccaaagggctgggattacaggcatgagccaccatgcccgcccccgaaagttagtttttcaacatttgtctcctatccctacctccccactctggtagtccccagtgtttatctgtcccatcttcatgtccatgcatacccaatgtttacctcccacttataagtgagaagatgaggtatttggttatctgttcctgtgtcagtttgcttaggataatgacctccagctgcatctgtgttgctgcaaaggacattatttcattatttatttatttatttatttttgagacagagtcttgctctgttgcccagcctggagtgcaacggcgctatctcggctcactgcaacctccgcctcccaggctcaagtaattcccttgcctcagcctcccgagtagctgggactacaggtgcctgccaccacacccaaataatttttgtattttcagtagagatggggtttccctttgctggccaggctggtctccaactcctgacctcaagtgatccacctgcctcggcctcccaaagtgctggaattacaggtgtgagccaccgcaccaggcttcattcttttttatgactgcatagtattccatggtgtacatttatcacattttctttatccaatccactgttggtgggcacctgagttgattccatgtctttgctattgtaaatagcattgcggtgaacaccactgtactaagttatagatctatcatgcttttatgtttgggacattgcataaggtattcacttgtggaactgataacttcctgtttacttactaatgataacggccagcatttatatggcacttcctctcaggtgcagctctccctagctcattcttcctcatgaccctatgaaatgaggcctattattatcagcatgttaaagatgaggacacacagaggtgaggtaatttgtccactgtcacacagcaagaaagtggcaaaggcaggatatgaaccaggggctgactggtttcagtcagggcccttaccctctgtggtctctcaaaattaatttcttcttcttctttttttttttgagacagggtcttgctgtctcccagactggagtgcagtggcatgactatggggaactacaacctcgacttcctggactcaagcgatcctcctgcctcagcctcccaagtagctgggagtacaagcacacaccaccatgctgggctaatttttgtttggacagggtctcgctatgttgcccaggctggataaattattattattattactatttttgagacagagtttccctcttgtcgcccaggctggagtgcaatggtgtgatctcggctcactgcaacctctgccttccggattcaagcgattctcctgcctcagcctcccaagcagctgggattacaggcgtgcaccaccacacccagctaagttttgtattattagtagagaaggggtttcaccatgttggccaggctggtctcgaactcctgacctcaggtgatctaccctcctcggcctcccaaagtgttgggattacaggtgtgagccactgcgcctggccgataaattataaaaaaaaaaaatacgttgaagtaaatattatgggtagtaccgccaagatactagaacacatgttaaggcttaaaaaaacagaggccgggcactttgggaggccgagaatagcttgaacccaggggacggaggttgcggtgagcctagatcgtgccactgcactccagcctgggcgaaagagcgaaactccgtctcaaaacaaaacaaaatataacacaacaacaacaaaatcacaatctgtctcgattactcatttattcaacccgcattcacctactgtgtgcacgagcttttctagggcactggggaggcagaagggactaaaacaaagtataaatctccctgggctgcaagcatcgggagggcaggtccgggggctctgtgtccccactgggcccccagcactgcgcagcgcacacagtgggcgctcaccaagcgctcgctaagggcaacgcgtgaatccgtgtcccgccagcagggcgtttacggcctggtggggcggaaacggacccgacaccaccgcggcgtcctggggcttctgggaatcccatcagcgcggccagagcggccggggacaggctccgaggcaggcccgacccgcctccccggcgccgccgtggctcgacggagaccagctagggtgagtgatcgagccacgcctggggtcccggcctgtcaccccgaagtccccgccgccttccaccctgtcaggctccaactctgggctccggcgcggtcccacctccggggggaactcccctccatcccctccatttccttcatcctcgactcccgctatcttttcggacctgcggcgctccccctggacgcgtcctcccgccggacgaccgtcctccgcctcaggggacgcgcccaggacgcacggcgccccctccccagccggaccggcggtctgggagcgcggatcccttcagctcccccgcgccccagcatccggatcagggctcgaggcagtcgacaaactacacccgagctcgagcaggcgcgcccctgaacccccgggactggggctgggggcgggggcggcgccggcgcggagggcccagtccccggacgtccgcagcctcccattggctccgggtcccgccgctcggcctggcggggccggggctggtccgcccggacgcggggcggggattcctgaagcccctcctccggcgagggcggagggaagaggaggaggaggaggaggaggaagggggtggggggcggaacacaaaacctgagaggtttttttttttttttttccgtttgcatttaattaaaaaaaattttttttttttttgcatacccgaggggcgctccccggaacgggcgcgggcccggggcgcgcgggcctgggcgcggggcggcggcgggggcccggcagcggctgccgagcggccgccatgcgatcaggcagtgcgctgaccggcccggccggccggccccttctgggtcctccctttgcagcccgtgcggggccgtctcggagaccccgcgccgacggctgctcaaacatcagggtgagtttctcacaatgtagcaatttctctttaaatctcttaactctctctacctgcgagtcggggctgtgacagggcgcaaaagcgaggggggagtgggggttggcggcgagggtgtgtgtggggggagccggagccggggccgaacccacccccgcgacactctcacactcagccccccagccggggcgcagcgcccgctgcctccttttttttttttttttttttttcctgctcggcgcccaccgccaccggcacccccagccccgcgtctcttccaccaccgccgccgccccgatcctatggggacccccccccaaccggcttccctgcccagacccggcgcccagtgcctccccggccctcccgccggctgccggggatacaatggagcggcggagagaggagacctaacgttccacggggggaggggcgcggagaccccctccccgtcccggccccctcccctcgccccgctccccgcctttcggggaaggcgaaggccaccgggcagcgggcggtgatctcccggccggaggcggagagcctgcatctccccgcctcgctcggcccctgcgccccctccccaaatccctcccgtgggtgtcgcggacagtggggggccctggaaagctggggagggatggatggggaaggaggccaccggggctccccccttcgcaccgcccctaaacaatgaaaggagttgacttgacccccagcccccggcaatagagggaggtgaccccctcccccacccccagctgaggctcatcccggagggggccgttacgggggtggggggggtgagcgcctcctgtcacttcccgaggttcggggcggccccccatctcctacccctcggcctgggaacgggaggcaccaggcccggccggggcaccgcgctcgggtggtgacctttagacaaaggcagccctttccccggggtgagcccggacgagctgggcctgcggcctccccgggcccctgcggagggcagccaggccgcgggcacccggagggagggatggaggaggagggaggagggatggagccatctggttttcccatccctggctgcccctcgtctgcttccccgactcctgtcacgggcggccgcggggagacgagggaccaggggctgcttgggccttggtgcgcggccagccgggaggaccgggcaaggagccgcgggagagctaggctcgggctcgggcgccggcggtgattgggaggcactgcggcttcttcctctccgcgcccctttgttttgctttgtggttctgagcagctgaacttcccgggaggtggggtcagaggccgcggtgtcagctctcccggggaggcccaggtgacaggtcctagctctctggtgtccccatcctggtgggctgcagtctgtgcccaggcccatgtcctgaccatcgtccccttttgtcaccccccccccacacacacacctacctacccaccccatagtataatacagatctaggggtgcctttctcttacacctctttacggagggcacttgaaagggaaactagaaacatccaaggcatcaaggcctgagattcatgataagctctctgtgcttttaacctctcccagcacctggggtgggtgtggggggtattgtcaactctgacctgccctgggtcatgagaaaatgggaagacaactcaggaagcacccccttcccatgcactggtaggacttttgggacatgttgacctcccttgccttccctcatagctccccgctcaagatggaaatattaataacaatatcaaactagggagctttattccgctgctgctaagtacattacacgctggccacagtccaaggaggaaatagagacgggacagacattcccgttttccagacaggttcatggaggctcagagaggttaagaagcttgcccagggtcacacagccctgggtcacacagagccccaatttgtaacctcctggagtttttccagcttggctcaaaactgttaagcccttcttctgtcccaccctttggcattttgtccccctgacttcagtggacctggttcggaaatgtagataatatttagaagaagcggccagattttttttttccctgggagctggttttgagaaggggtaagatgcacctcgaagttgggctgagggcaggatcatttcacttgtggctggaatggagaattgtctgcaggaactgagaactgaaggtgtgtgaggagtgggggagggggagccccaggcctggccagtgatgggctcggggtacctgggagctggccccactgtcatcttctcccttctctacctgagcgggggacttggccccatttgctgctactcagccctgaagtagagaagagagaagctgaactgtttgggaatgttgatgtctggttgttcctatgccctgtgacccgctgtcgctttgccacaccatggccctttgatgcagctagcggagaactttcttgcctgttctccttggcatgatccactctgtaaccttaggcaggtcatttaactgctggtcctgttttctcatctgcaagtgggggtaattatagttcctttaagtgacctggaggtgggtaaaagtattatccaaacgtgtcattcatatttatcattcagcaggccgggtacgcagtgtgggcacaggggaggaatgtcaactggtggcatttaatttttttttttttttgagacagagtctcgctgtgttgcccaggctggagtgcaatggcctgatcttggttcactgcaacctctgcctcccaggttcaagcgattgtcctgcctcagcgtcccgagtagctgggattacaggcacccaccaccacacctggctaaattttgtatatttagtaaagacgggatttcaccatattggccaggctggtcttgaggtcctgacctcaggtaatctgactggcatttaaatttaaggccaggtgccatggctcacacctgtaaccccaacacttggggagaccgaggctggaggattgcttgagccctggattttaagaccagcctaggcaacacggtgagaccctgtgtctacaaaaaatgaaaaaattagttgggcatggtggcactcacctgtggtcctagctacttgggggtgctgaggtgggaggattgcttgagcctaggagtttgaagctggggtgagccgtgattgtgccactgctctcaagcctgggcaagagtgagaccctgtctcaaaaaaaaaaaataaataaaataaaaaatgtaaaggtgagtggcagaatacctttgccccagaagaattccctgtggtctgggaaggccacctgcaaacgaacaattccccttcagtgacacgcaccctctgagcgctttggggactaggcccctaccccttcagcactttacccatgcggaatacatgcttagctgtaggggctggggggctgagggagaggggctggggggctgacggagaggggctggacccagctcacccagtgtaggaggtaatacaggtgatcttgccattttacagatggggaaactgaggccaggggaagcatgttccacggccgagctgggactccaagccagacggcagagactagtggtgggggttccgtatttgtcaacagaactggggagatggtgcttcatggggtctgatcccaggagctttaagggaccccttatccccgcagccactgtcccctcctttaagtgcagttatttcccttggcgagatgacaggcataagtaataagaattctcgggggaggtgggcaggaggagaggggctgtggggacacccagatctctcaagattgagtgctggctgaatgtaggaactgatctttttggggggctggtgggagaagtccgagtgaggccctagagggtctcccggctgacttccttctcagaggcctgtggcccttccctaaccttccttcaggaggtggggtgtgccccaggctgtggaagggccaggggatcagcacccagaggcctatgaagggggagttcctgggggtgtataaggctccccaggttcccgtgggccaccttgtagcccaggtctagccagcagcccagttcccccgccagctctcaacccccacccgccaggctgccttgactccaggtctcaagaatgcagaaggctgctggtaggggaagttaattggaaacaggaaaacatggcattcctttccaggccgcctgggcttggaaggcagaggggctgccatttcccttctcccgccctgcaggggagaggggtggggagtatggttatcttgccctggtcatatttgagctttcttccccgaccaggcaccctcacttagtagaaacaagagcagtcacccgtgccgtgtccacgatgacaactgctgcctgctcccccagcagaagaattgccccctccttactcaccccttcatatccctctggttttttgtcccctgtcttgtctgagctagctccctggtaggatgcaccttatgccacactagagacgcatggggagcgtttggttgaggggtccccagggagtgtctcctggttccgtccctcgcattctcctctgcctggagtaccaccagtagagttttgtcccagttgactgaagcttttgtgtctcagtgacacgcaagtttccccagtggagagggagagttttctaaggcatttctagtttggtgacaattagttttgtgtatgagtgtatgtattcattggggggagggggaaaggagtgttggcacaagcagagaaggcctttgtttctttaattgttcccaattaaacttcctgagggcctactgtgtgacagggccctggggatcagttaagaccttgggacacagtccaggaggaggagagagaacggttggattagccgctgtggggtttcattcattctgtctgggtggtctgagacatcatctttttctctgtctgccttttgttccttttgttctaagtgatacacacacggggcaaattcagaacactaaagatggtgtctctccctctaacctctccagaatccctggtcccctagctctcttccccagagacagcacctccattctgatgttctgtgcatgtacttttatatatggatgttatgtgtttaaaactattcaggccgggcatggtggctcacgcctgtaatcccagcactttgggaggctgaagtgggcagatcacctgcggtcaggagttcaagaccagcctggccaacatggtgaaaccccatctctcctaaaaatacaaaaatgagctgggcatggtggtgcatggctgtaatcccagctactcaggagcctgaggcaggggaattgcttgaatgcaggaggcggaggttgcggtgagccgagattgcggtagcactgcactccactccagcctgggcgacacagcgagactctgtctaaaacaaacaaacagacaaacaaaaaactattcatcttacacagatggtagtctggtctatgcattgctttttttccacgcttcatctccctgggagaccctaccaatgtaggtcttcctctatctttttcttggctgcatggtattcctctgtgtgggtgaatcctcctttactgttatggacgtggaggtgtttccaaaggtttctgtgtgaagcatgggaaggcatacgtccgcacatgttacagggaaatgagtacgcctgtgggatagactcctggaagtgggattgctagatcaagggccagtgatttgtcttttggtagctcttacggagcacctttgatgttgcacgttgcatctttttttatttttttgagacagaatcttgctgtgtcacccaggctggagtgcagtggcgccatcacttttcactgcagcattatccttcctgggctcaagtgagcctcgcatctcagcctccccagtagctgggactacaggtgcacgccaccacgcccagggagttttaatatttttggtaaagacgaggtctcactgtgttgcccaggctggtcttgaaatcctgttcaagcactcctcccgccttggcctcccaatgtgctgggattacaggcgtgagccaccgtgcccggcccctcatgctgcaccttgaagaaagttgttctctttctctcctcttcaatgtgatcccacctgtcgcccaggcagcatctccaggctgcacgtgtctttgcctcaggtgacctccttgtgtctgatgacctccttgcctcttcctcctgcttatggcctgcgtcatgtgcttgccacctggtgtggaggtcaggagcgtgggctctgggccctgcctgttggttctaatcccagttctgctatttgctggctgaatggctgtggacaggggacttgcttggggccttggttttcccctctattaagtgggttcatatcagtacctacttggtaaggctcttgtgagggtccccaaacacccataaagtgccaaggtagccttgtcagtcagtgtcggtgtcacctgtcattcttaggcagtttatttctcctggggactgtgacccccttaattggcaggtgttggatggaatgctggcttctctgcttaattgcagtgtgaccctgggcaagcaattcctttgcatggcctcagtttccttgtctataaaatgggcccatgatgcctccctcgtagggtctgctgtgaggctgaacgaagcaatgttctgccaagctgggcaggcagtcgctttcaggaactagcaaatgatgctgctgttgttttcactatgattactgttctcctgcgggactcatgctgactcctccgctctgaaaggtccccattgtcttcctgaaaggcacacaaggaacaatgttggcattctaaactgcatggcagcagagggcacgcagcaggctgctccggcatgaggcacacagggcttccctgtaccgtgcctcagtttccccaactggaagagtgggcatgagaggaaacccacctcaggcatgcttagtgttcagcacagtgcctggggtatagcaagcgcccaaaaaatgtgagtggctgtgattggaataattattattaagtagcagagtctcccataggattagatacccaagttgctatggcctttcccccaaaccctaggcaatcagtgttggcattttaaatggaaggcacagggctggcattggtggctcatgcctgtaatcccagcactttgggaggccaaggcaggcggatcacttgaggtcaggagttcgagaccagcctggccaacatggtgaagccctgtctctactaaaaatacaaaaaaattagccaggcgtggtggcgcatgcttgtaatcccagctactcaggaggctgaggcatgagaatcgcttgaaactgggaggcggaggttgcagtgagctgagatcgcacgattgcactccagccagggcgacagagcaagactctgtctcaaaaaaaaaaaaaggaagacaatgcccaaatacccactgggccacaatttcctcttctgtaacagagcttccccgctttgggtgttgtgacgcttcaatgagtgaagacttgggaagctttttaggataggacctggctctcaggaatgctcagtgaagcttcactttgattcttattatcttttatttttattaattttttttttttgagacaagaatctctctctgcgcccaggctggagtacagtggtgtgatcttggctcactgcaacctccgcctcccaggttcaagtgattcttatgtctcagcctcccgagtagctatggctacagatgtgggccacgacacccagctaattttgtatattttgtagagctggtgtttggccatgttggccaggctagtctcgaactcctggactcaagcaatccacccgcctcagcttcccaaagtgctgggattacaaacatgagccaccataccaggcctattatttttaaatattttattttattttatagagacaaggtcttgctatattgctcaggctggtctccaacttctgggctcaacagtcctccgactttggcctcccaaagtcctgggattataggcatgagcaactgcacctggccgtctttgtttattattattttgttttcttttttctttttttttgccatctagactcggcttggcagatttatttattgttattttaacttatattttttatttttttgagacaggctctcactgtgtcacccagactggagtgtagtggcgccatatcggctcactgcaacctccgcctcccaggctccagcagttctcgtgcctcagtctcccgagtagctggaattacaggtgcctgccaccacacacggctaattgttgtatttttagtagagaaggggtttcaccatgttggccaggctggtctcgaactcctgaactcaggtgatctgctcacctaggccccccaaagtgctgggattacaagcatgagctatgcacctggcctttttaactttttgttaaggaaattttaaagcactcaccgagagttgagaaaatagcacaaccacccctgtgtaaccatcaccagcttctgcaaaaattttctgctgatctgatcttttttttttggccattacctactgtgcacatatattttttcttttttgccaaggtattttaaagcaaattccagatatcatatcatttccattgtattattattgttattaatggtggtgttatttctgggatccagaatttgtttcagcacctccagagtctgtcctgttctatgaagaaagtggcattaggcccatttcataggttgggaaactgaggcagcagggagtgggctttgatcaggtggtcctttttctgtgatcccctttttgggactgtggtgaattccctgtcttggccacaccaagcctcaaaccctgtgggttgtttctgattacacaggtttgggggtcacacctgggtgcatgcagtgtggggtacaggttctgttactctgtgcagaaatcgtcctcataaaggaagagttgaagtggggctggcagcaggggatggacccctaggatgaccctggaggtgatgggcaactgggtcagctgtgtgggttaaagtcctgtttctgctccttctaaccctgtgacttggtggcaagctatttccctcctttagtccaggttagagaactggaagtacaggagagataataaatacttatttggatgaccttattgttaaataaggtctagcgtggaaaagatgttttgcaagtgcctggctcagagtaaacggtcactattgttagtgttgttattgcttctgtgtatactcttgaggttggggacaaaaatgctgtttctaggattgcagaggaagggttgatgccccttgaccccccagcccggccccgctaccttcattcccttgccatgcccaccctgtccctctgcactctccctttgaagtgcttgcctgtttagggggctgccaacttcagcgtggcccctctcagcctcttatgtcctctgtgtcccagcctggtaaccttgggaacggagtgagcgggaatatctgtctgaggctgtgagacccttgctaaagacccttggggtccttgagggagcgcctggtggcctctgctgcctggaggcagaggatggcccagtgtccagggacacctgcaggtgaagctccccggagccacctttccagaggctggatgccaactctcgtccaccgtgtgaggctgggcgggcagatgtccacagcgcctgcctcacagggtggctgtgacagttagctggactataacctccatcacctggcacgcatagtgtctcattgacctcagacacttggcgcccggcctgggtgcgggagttctccctgggagaagtctgagctcacagcttagcaagctcttgctgtactgcggaatttctctccctagaacgtgcgcggtgatctcctacttttgtgtgtatacttactctttcgtggacagtgtatatatatatgtatatatacatatatatatacacattttttttcccaaccccttttttttttccttttttttgtgtgtgtgtgtttgagatggggtctcgctgtttcgctctgtcccctaggccggagtgcagtggcactatctcggctcgttgcaacctccgcctcccgggttcaagacattctccctgcctcagccttccgagtagctgggattataggcgcccgccaccacgcccggttagtttttgtatttttagtagagatgaggtttcaccatgttggccaggctggtctcgaactcctgacctcaggtgatctgcctgctttggcttcccgaagtgctgggattacaggtgtgagccactggtcccagcctctcccaatcctttttcattgaagtgtaattcgtatacagtaaaatccgcagaggggccaggcacggtggctcacacctgtaatcccagcactttttgggagggcgaggtgggaggatcacttgaggccgggagtccgagaccagcctaggcaacataataagaccctatctctccaaaaaacaaataaagaccttagccagttgtggtggcccctgcctggatctaatctggaggctgaggtaggagaattgcttgagtccaggaggctgaggctgcagagagccattcattaaaatgcacatagtttaagcatgcctttccatgagtcctaacccctatcaagatacagcacattctcgtcactgccagaaagttgccctttgccccttcctggtcagtacctgctcccagaagcagtcactggcttgccttgtcattgtgggtcagccttgcctcttctagaatttcacagagggggagtcctgccccgtggagtccgttgggttgagcatcttcggctcagcatgatccttttgagatgcagggatgttggtgtgtgtgtatcgggagtgtcttcctttaagaaattctttcccgtgagtatttcttcaagcctggctttctcatgaggctccaaactgcagaagatgagaagggagggctgtgtttcctgtgttctcagctcctggtgtgcagtaggtgctctgtagatgcttgttgaatgaatggatgggtggatgacaggcatgtcccagggatggagaaaggggagcagagaccctgtctttggagttcctgtgtgtttctcaaaaagtgtcccactggccagggcgcagtggctcacacctctaatcccagcactttgggaggtcagggcaggtggatcacctgaggtcgggagtttgagaccagcttgggcaacatggtgaaaccccgtctctacaaaaaaatacaaaaagtagccgagcatggtggtgcatgcttgtagtcccagcaacttgggaagctgagaggtgggaggatcacttgagcccagaaggtcgaggctccagttagctgtgatcataccactgcactttagcttgggcgacagagtgagactgtctcaaaaaaaaaaaaaaaaaaaaaacaagaacaaaacccacatgcttccaaatgaccagggatgcttgtgaaaaatgaccatccctgggctccacacagaccaaactcctgggaatcccgatgagtggcgtccaggaaacagcattttcatcaagcgctgtctctgagtagttcttttgcacaggtagcccagccctaaatcctaggcctcttccggcagcagcagagctccccagcaggcctgtcatccagtcaaggcggccatgggtcttggagccccactcgatctctgtctacggccattgcttgtcctgaccctggctgcctccctggtgcctctgtgtgagcctggagtcctgtactcactccctaagtgctgttcaaagagggaatgaatgggaacctgggaggtaggtcaggattgttgacctccccactgctcagcggggaaaccgaggctccatgagttctggtgtttctcctgcagttcacctgggagtggaagccagacagggtatttcctgggctaagcagccatcagttgtaagatgcagcttccttttcagagacaaaagtgtgaaaaatgcgcatcttggagttgataaaactcaggaaaagtcctgtcccaccctgcagtttgcccgctgtctcaaggctgttttgtgcagggttgtctttttctgttaaatttctgtctcgttagccaaaggaacaaaatcccctgatgtcttcccagtgctttgtaccttctcaagcatgtccccttccatggtcctgcttttgtatttaaaattttttagtcttttttttttttttttttaaatgcgagatggaattttgctcttgttgcccaggctggagtgcaatggtgctatcttggctcactgcaacctccgcctcccaggttcaagcaattctcctgcctcagcctcctgagtagctgggattacgggcacatgccaccacacccggctgatttttgtatttttagtagagagggggtttcaccatgtcaggctggttttgaactcctgacctcagttgatcactggcgtccgcctcccaaagtgctgggattacaggcgtgagccactgcacccggcctgaattgagagacttctttaactcagtttctttttattttcaagatggagccttgctctgtcgcccaggctggagtgcaatagtgcgatcttggctcactgcaacctccacctcccaggttcaagcaattctcctgccttggcttctcaagtagctggtgttacaggcgtgcaccaccacccccagctaatttttgtactttatttttttttttttgagatgaagtctcactctgttgcctaagctggagtgcagtggtgcgattttggcccactgcaacctctacctcccgggttcaagcagttctcctgcctcagcctcccgagtagctgggactacaggcctgcaccaccatgcccagctaatttttgtatttttagtagagacaggtttcactatgttggccaggctggtctcgaactcctcaccttgtgatctgcccgccatggcctcccaaagtgctggaattacaggtgtgagccaccactcccggccatacttttttagtagagatggggtttcgccgccatgttggccaggctagtctcgaactcctgacctcaggtgatcctctcgccttggcctcccagagtgctgggattacaggcatgagccaccacgcctgagtgtaacttggtttctaacaaaagtctgcttaaaaatatgtaggagtgggccgggcgtggtggctcacgcctgtaatcccagcactttgggaggctgaggcgggcagatcacgaggtcaggagatcgagaccatcctggctaatgcggtgaaaccctgtctctactaaaaatacaaaaaattagctggacgtagtggctggcgcctgtagtcccagctactcgggagactgaggcaggagaatggtgtgaacccgggaggcggagcttgcagtgagccgagattgtgccactgcactccagcctgggtgacagagtgagactctgtctcaaaaaaaaaaaaaaaaaaaaaaaatttaggagtgggccgggtgcggtggctcatgcctgtaatcctagcactttgggagcccaaggtgggtggatcacgaggtcaggagttcaagaccagcctgggcaacatggtgaagccccatctctactaaaaatacaaaaattagctgggcatggtggcaggcacctgtaatcctagctactcaggaggctgaggcagagaattgtttgagcccaggaggcggaggttgcaatgagccgagatagtgccactgcactccagcctgggtgacagaacgagaggccatctcaaaaaaaaaaaagtgtgtgtgtgtgtactctcatatattagacattacataatacataatagaaatataaaactatacattattatatataaaaatatatactcctatttataaaattcccttttattttcattcccctccccgtcagcgacctcctgtgctggagtgaattgcttgctttgtgcgatggatttttgctttacagaaaggatactgcttctgtttctcctcctgctgcttttcctcccagtgctgtgtttagagggtcgccttgttggttacctgtccctccctgctgctcctccctgctgtgcgctccatgggctgcaggtagtacagttcacttcaaatcctcatgagggtcagacccccaggtgttcaccatctccctgtcacagaggcacagaggtaaaatgacttcccaaggtcacacagggagctgctgcctgagctgggattttcgtcctcctggttaattcagactcacactcaggcttcctactgcttggactgtggcccatgttctcacctccagcacaaatagccggtgctgtgccttcagggactggggagagcgatgaggcaggaacacacccattcccctgcaaagccagatcagtgtctgaggattgccagctgagcctggggaggtcaggcggggaggcatcagggtaggcttcctggaggagggagcttctagggcaggctttggggcttgggggtagggtaagaaaaacagggaatctagcatgatccaaggtcattgccctgagcagctgggtggaaggaagtgttctttctctctctctcttttttttttttttttgagactgagaccgagtttagttcttgttgcccaggctggagtgcagtggcgcgatcttggctcaccgcaacctctgccttcggcgttcaagagattctcgtgcctcagctccccgagtagctgggattacaggcacgcaccaccgcgcccggctaattttgtgtttttagtagcgtcggggtttctccatgttggccaggctggtcttgaactcccgacctcagatgatccgcccacctctgcctcccaaagtgctgggattacaggcgtgagccaacatgcccggcagattgtgactccctagtgccctcaggtaaaacctcttcagctccgtacaaagtctttctgatctggcctggcttatctcctacccttttcatcttgcctttcactcaccaagctggttcccgcctccccacctcggcctgcactgtactctgcccagagtcatcttcccctgctacaagcataccccagagagcaggcaggttaggttctagacagtgcagtaaagtgagtatcacaatagagcgagccacacacgttttttgattctccagtggatacaaaagttacgtttatacgatactgcaatctgttaagtgtgcaataacatcatgtctaaaaaaaccagtgtacataccttaattaaaaattgctttattgctaaaatatgctgatactgacatgaagtgagcttgtgactgggaaaatgatgcagatagactcactggacaaagggttgccagaaaccttcagttcgtaaaaaaatgctgtgtctttgaagtgtagtaacaagttatgcctgtacctcccactgccacgccctgacttttttttttttctttggaagatagggtctcattctgtcgcccaggctggaatgcagtggtgtgatcatactcactcctgtcttgacctcccaggctcaagcgttcctccaacctcagctacccgagtagttgggaccgcaggcatgtgccaccatacctggctgattttttaagtttttgcagagatgaggtttcactatgttgcccaggctggccttgaactcccgggctcaagtgatcctcctgactcagtctcccacagtgctgggattacagacatgagccactgcacctggctttttttttttttttttttttttttgagacagagtctcactctgttgcccagggtgaagtgcagtgacgtgatctcagctcactgcaacctccacctcctgggttcaagtagttctcctgcctcagcctcctgagtagctgggattacaggcgtgagccaccacgcccagctaatttttgtatttttagtagagatagggtttcaccatgttggccaggctggtctcgaactcctgacctccagtgatttgccctcctcagcctcccaaagtgttgagattacaggtgtgagccaccaacctggccttttttttttttttttaagagacagggtctcactggtgcccaggctggattgcggtggcgtgattgtggttcactgtggcctccaactcttttggggccacatctcgcaggtctctgcttaaatgctccctcctcggggaagccctctttgactttctcgtccaatttccttcacttcactgagcttatttccatgttaggtgacatcctcagggtctgacaaggactgaataaacccctaactgatactgaatgattgaggggccaggtgacctttatacagatcgtgaggagattgggttgggtttggattgggtttttgagtttctgagctgagttggaggcttaggagagaaaaggaaagaaggtgagggaaggttctggaagagcctggaggaggtggtactgggttgggctcagaagtgaagtttgctcacagtttgcgaagtggagagggtgtgaaggcagaggttgtgtgtacaattgggaaagcgttcaggaggccagcatggatgggctgagagacacaggaggagagggaggccgtggggctgtgtgggggccgggggcacggggagctggtagttagggagagctctggcagctgccttgctcgacatggagaggcgccttttgtttcttggcccctgggtcttatgagcaaatggtggttcttaatttggggtaagagggagctccagtccttttaggaatctgcttagaggccacagacttttccccagagaaacacacacttgactctgtatcccaaagtttggcaaaggggttcaggaggggtggggagccagttaagagctgttcacggatcgtgatggcaataaccatgataatcacagccagcacttaccttggctcgccccagcttggttctggtctaggccacttacaagcatcagctccttcactcacagaaggactggaggaggtaggtgcagggagcaccccgattttacacgagtaaactgaggcacagagcgattaagtgacttgcccagagcccgacagctgctaagtggcagagcccccactctcttccctggatggtctgcttcctggatggagcctgtttctgttttgttttgttttggagacagagtgagactctgtctcccaggctggagtgcagtagtgtgatcttggcttgctgcagccccgacctctcgatctcccaggctcaagcaatcttccttcctcagccgcccaagtagctgggactacagtcatgtgccaccatggcccgctaattttttggtttttttttttttttttttagagacagggtcttgccatgttgcccagggtggtcttgaactcctgggctcaggtgatctgcctgccttggcctcccaaagcagtgagattacaggcatgagctaccacgtccagctgcatcctgggttttttttttttttttttttctgagacagagtctcgctcggtcacctaggctggagtgcaatggcgtgatctcagctcactgcaacctccacctcccgggttcaagcaactctcctgcctcagcctctggagcagctgggattacaggcgcccaccaccacacccagctaatttttgtatttttagtagagatggggtttcaccatgtcagtcaggctcgtcttgaactcctgtcctcaagtgatccgcccgtcttggcctcccagagtgctgggattacaggcgtgagccaccgcgcttggtccaccctgggtttttattcatcaagcctcgctgcccccttggtacaggggccaagaccacagctgggaagctcctttcctcttgccccaagagccagcctgggttgctgctgagccattgcaggctgaggcacagcctctctttctccttttacgcttcctgatgtcttctttaacataatcatggccacctcagcttctttcagagagcaatatgttcctgagctagagacatgggtgaccagctggagtcaggatttggggggtgtggtgtaggtctagagccaactgtggcactggaacaaggcccctaccttgttcagcctcagtttccctaatcagctagagaggcctacttcctccttggaggttaaatagatgacattcataggtcaacggaaatgctgcatttatggcaataactgaccttgtaggtgtttcaaaattcaggccgtttcagaccagagtgcacacaggatgatgtgggaccccccagcaaggcaggcagctccccgtcagcacatatgctagcacttctgcgaagatttctgcagcaaatatatctgctgctgttgatactaagagggagatctaaggacagccattgcagttccactttgccccacaatgagccaggaaaaaagaaaaggatggctttagagatttttggaggttggaattgcagattagggggccacagacctaaaatgcctaccgagtaggatgagtgggttttttgtttgtttgttttgttttgttttgttttttgagacagagtcttgctctgttgcccaggctggagtgcagtggcacgatctcggctcactgcaacctccacctcccgggttcaagcgattcttctgcctcagcctcccaagtagctgggattacaggcgcatgccactatgtctggctaatttctgtatttttagtagagacgggatttcttcatgttggccaggctggtctcgaacccctgacctcgtgatccactcatgtcagctcctcgaagtggtgggattacaggtgtgagccaccgcgccgggccagggtgtggggtttaattgggatgatatgttgtggagtgactggcacatgacaacatgacaaggactttgtcattgctggttgctattactattgactgttgttgctattattattactaacccctcttcggtctgtatgggctggtgcagacacattgggctgtgatgcagatccacagttttctagacttgcacaccagttcctgggggatcctgttaccacgtgagttctgagtcagctggtgcagacactttgcatttcttaactcccaggtgaggctgctgtggtcaggggcctgccctctgagtagtaaggtgtccagtggttttccaggtgtttctgagttactttcaaggattctgcaaatggaggggaggcattggatgccagggtcaaaataagattccttagctcttagctttggggtttgccaatttgcagccaggtctgtgttaatcattacatatggaaaaaagtcatataacacgacgaaagtctttgcaccatctcctcttctttccttttccaaaggtgacctctgtggggagtttggggctcatggtctctctctgttgtccaggctggagtgcagtggcatgatcatagttcattgcagtctcaacatcctgggttcaggtgatccttccacctcagcctcctgagtagctggggctacaggcacatgccaccacacccagctaatttttgtatttttttttgtagacacagggttttgccatgttgcccaggctggtctcaaactcctgggctcaagtgatcctcctgcctcggcctcccaaagtactgggattacaggtgtgagccaccgcacctggccttaatcatttttaaatgtgcagttcagtagtgttaaatgtacttttattatgtaacagatctccagagctttttcatcttgcccaactgaaactttatttatttatttttttgagatgcagtctcgctgtgttgcccaggctggagtgcagtggcacaatctcggctcactgcaagctccgcttcccgggttcaaaccattctcctgcctcagcctcccaagtagctgagactacaggtgcccaccaccacgcccggctaattttttttgtgtttttagtagagacggggtttcaccgtgttagccaggatagtctcaatctcctgacctcatgatccacccgcctcggcctcccaaagtgctgggattacaggcgtgagccaccacacccggcgtccaactgaaactttatatgcattcaacaactccccccatccccagtccctagtagcctccattcaactttctgtctctatgaatttgactttaagtgccaaatttaagtggactcctgtagtatttgtcatactgtcactggcttatttcacttattgtattgtcctgaaggcttattcgtggtgtggcatgtgacaggatttctctcctctttaaggttgaataatattccgttgcatgaatagaccacattttgcctatccatttatctgtcgatgaacacatgagttgcttactcctcttggctattgcgaataatgctgctttgaacatgagtgtgcaaatatctattttttttgtgtggttttttttgagacggagtctcgctctgtcgcccaggctggagtacagtggtgcgatctcgactcactgcaacccctgcctcgcaggttcaagtgattcctctgcctcagcttcctgagtagctgggattacaggcacccaccaccatacccagctaatttttgtatttttaatagagatggggtttcgccatgttggccagcgtggtctctaactcctgacctcaggtgatccacccgctgtggcctcttctcaaaatgctgggattacaggcatgagccacggcgcccggccacccattttagctctttttaagtgtataattcagtggcattaagtactttaatattgtgtaactgtcaccattatccattaccagaaccttttcatcattccaaatagaaactctgtacctattaaagagtaactctctatcctcccttccctcagcacctcgttacctctattctactctctatatattggccaattctttttttttttttttttttgagatggagtctcactctgtcgcctaggctggagtgcagtggcgcaatctcggctcactgcaagctccgcctcctgggttcacgccattctcctgcctcagccttctgagtagctgggactataggcgtccgccaccacgcctggctaattttttttgctttttgttttttttttagtagagacggggtttcactttgttagccaggatggtctccatctcctgacctcgtgatctgcccgcttcggcctcccaaagtgctgggattacaggtgtgagccactgcgcccggcctatattggctaattctaggtacctcatgtaaatggaatcatccagtatttgtccttttgtgttgatttcactttacatgtcttcatggttcatccctgttgtagcatgtatcagaattcttttctttttttgtggctaagttcatcttccattggatggatagaccacatttggtttacctattctgccatcgatggacacttgggtcatgtcccctttttgctattgtgaacgacgttgctgtgaacataggctctaagtatctgtttgactttttgccttcagtttgtttgggtttatatctaggagtggaattgctgggttgtatggtaatgatctgttctaacttttggaggagcagtggctacatcatttcacatttccacctgcagtgcacgtggttccagtttctccacatccttgccaacacttgttgtagtcttttattttttttccccacacgaagttttcaaaatctggtgtgtattttacactcacagcacatctcagttgggactcgacatatttcaagtgctcaaatgtcacgtgaagctgctcatagtggaaagcacaagtttagttgatttatgtttttggggttttttttgagacagagtctgactcttttgcccattctggagtgcagtcatcaaggcttactgtaacgttgaactcctgggttcaagcgattctttcacctcagcctcctgatagctgggactacagatgtgcaccaccccatctggctaattttttattttattttatttttttgagactgagtcatactctgtcacccaggctggagtgcagtggcgcaatcttggctcactgcaacctccgcctcctgggttcaagcaatgctcctgcctcagccttctcagtagctgggattacaggcgcacgccaccacacccggctaatttttgtatttttagtaaagacagggtttcaccatattggtcaggctggtctcgaactcctgacctcaggtgatctgccctcctcagcctcccaaagatctgggattataggcatgagccaccacatccagcctaattttaaaaattttttgtagaggcaggaactcactatgttgcccaggttggtctcaaactcctggcctcaagtgatctttttgccttggcctcccaaagttccgggattacagatgtgagccaccgcactcggccgatttatgtttattataattattggtatggctggagggcagtggtatgatcccggctcatggcagcctctgcctcttgggttcaagcaattctcctgactcagcctcccaagtagctgggactacaggtgcacactaccacgcctggctaatttttgtatgcttagtagagacggggtttcgccatattggccaggctggtctcaaagtcgtgacctcaggtgatccacccgcttcaccctcccaaagtgctgggattagaggcatgagctactgcgcccggcctttccctgcttcttttaaatggaatattttagtgttccattttatctccgcttttagcctggtagcgctacctctttattgctctagagtttccattctctgtctttgactaggactttggctttgaatctgagtgagatgggagccatgggagggctttgagctggggagtgacccgacctgacatttttatatccataccttgggttgcttatgcaagagtgtttccaccggccagattcctggaaaaggaattgctgaggcaaaagggagcgagcatttagactttggtggccccgccaagttgcattccagaaaggcttcaccattttcactgctggcaaacagcagccggagcttttgagtggctgttccatgccaggcctgtgccggactctggggaccttggcaggagtcagcctggggctggctgcttcctaattctcagtcctcgagtcctacctccgatctcaagaaaaggtgaggatttcagagaggccataaaaaggagaagcaagagatgattgtgggtggctgaaggcggcctggcacatcccaggtgatgggagagctggctgcatccgatggtcccaccgcagggagcgtgaccaggaggtggagtgtattggactgggaaccgcacgtgtgggctcccatcactgtgtgccatgttggggtgcagttgaggggtcaaataatagtaccgccctcatgggacttgtttgggaggattcagtgagagagcagagagcacacagtcagaacttaaggatccgggttgtcatttgaccaaatgatcagcacggtgggaggggaccaccttcaggcacaggcccacccagcctagggaaaggcgtgactcaagttttggacagtgtttaaggcctgtgtcagaagaacttgggctcggatccccagctgtctccttctcaggcaagttctctgttagacgaggttaaatgacagcagagtctgcctcccgaagtggtgcaagggttcggctcagtgagatgatagcaccaaagagttcagtatccatcctgaaccacagtaagggttgataaagcttagcggctcttattaatattgctgtcattttgttgctgtcattaattttatttgattttatttcttttttttttttttttttttgagacagtctcactctgtcacccaggccggagtgtggtggtgcgatctcagctcactgcaacctccacctctaaaattcaagcagttttcctgcctcagcctccaagtagctgggattataggtgcccgccaccacgcccgactaatttttttatttttagtagagacggggtttcaccatgttggtcaggctggtcttgagctcctgacctcaagtgatccgcctgccttggcctcccaaagtgctgggatcacagacctaagccacaatgccccggcgtatttttccaagatgggatctccctatgttttccaggctggtcttgaactctgggctccagtattcctcccctcagcctcccaaagtactgtaattacagacgtgagccacctttcctggccagtcattattttaaatttaaggcctaataggcaacagccagacccttagtcttcctctaggactaaagccccagaggtgtggggcagttgctcagggtcaggaaataatagagtagagatgggaagccaggttcctctgacccagggtttccccatttctggagagcttccaggtttagggagcaaagtctcttctcctgttataatggacagtgaacaagacatgatatgaaaacaccaccaatggtattaatcatgctaatggtacctcacctgtagtgagtcatcgggtgacaagccctgacctgaagccaggctatttataacccgtctttattgagctccatctgaatattcatatgtttagctcagaaatattaagaatggattgctgggtgtctcagaacccgccgaggggcgttctgtgcgttcaccctgtccccctccaaagcctgaaaaacccctcatttcagaacacgtctcactccagaggtttccactaaaagatcgtggagccatgtgaatgtaaattccgtttccccctcttcatacatcccaggctgcatactgcacacaccgtttggcatctcccagccttgtgttttattgtatttaccactcagctctccagtccttgccagacgagtgagaatgagcagtggcgtcaggccttgacgggctctgcagggtgggcgggaggagtgggcagtgcggcttctggaacccattctctgaaggctcagagcctggagcccagagcgaggccatggctgggatgagggaggaagggggaaagacatcatggactaactcgggcctgccctcgacatgggatctgccttgtgggaccaggaggaggccatgttggctgtgcccactttggtgggaaccaggaaggaggccgagccttgaaagtggccaggtagaggaaggaattcagaaagagtgcgccagaaggggtttcactcactttctctcccccttgatcactggcacgctgtctgcagcctgtaccactttgcgaaactcactaggttgtcgagagacacctcagacttaatgtgttcaataccatgctcctgatacggttctcctccccaggaagaaacccataaaaaccaaaacaaacaaagcctgcttctctccatctcagtaaacggcaccatctcagtaaatggcagctccgagctcccacccacctgggccagatactttggtgccatcctcaactctcttctctctcttaaaattaaatttttttttttttttttttttttggagacagagtctcgctctgtcacccaggctggagtgcagtggcgcgatctcggctcactgcaagctctgcttcccgggtttacgccattctcctccctcagcctcctgagtagctgggactgcaggcacccgccaccatgcctggttaattttttgtatttttagtagagatggggtttcactgtgttagccaagatggtctcgatctcctgacctcgttatccgcccgccttggcctcccaaagtgctgggattacaggcgtgagccaccgctcctggccacatacgtaaagcttttagaataatgcctgatacatcaaaagcaacataaatgttagctgctgttattataattttattgtggtacaatatacataacataaaattgaaccatttttaagtatacagtttggtggcactaagtaccttcataatgttgtacaatcatcactactgtccatttctaggattttttttttttttttgagaccgggtctggctctgtcgcccaggctggagtgcagtggctggatcttggctcactgcaacctccgcctcctgggctcaagtgatcctcccacctcactctatcaagtaggcgggactacaggagcgtgccaccacatgtggctaattttttttttttactttttgtagagacagggtctcactatgttgcccaggctggtcttgaactcctgggctcaagctatccacctgccttggcctcccaaagtgctgggattgcaggcatgagccactgcacctgtttctatttctaggatttttttcaaacagaagctcgatacctgttgaacaataactctccattctccctggcccccagcccctgcaaaactcttctgctttctgtctcattgaattccctactctaggcacctcatctaagtggaatcatgtgatatttgtccctttgtgtctggtttattttatttaacacagtaaaggctcatacatgctatagcacatatcagaattcatccctttctaaggctgggtaatactccattgtgcagatataccacagtttgtttacccacttttctgctgaaatggataaacttggattgtttccaccttttaactacaagttgagcatcccctaatctaaaaatccaaaatgccccaaaatctgaaactttttgatcaccagcatgaagcctttgctttctgatggttcagtgtacacaaactttttcatgcgcaaaattattaaaattattttataacattaccttcagactatgtgtataaagtgtatatgaaacataaatgaattttatgtttatactcagttcccatccccaagacagctcattatgtatatgcaaatatttcaaaactcctacaaaatctgaaacctggagcacttctggtcccaattatttcaggttaagggatgctcaacctgtattattattttgagacagagcgttgctctgttgcccagtctggagtgcagtggtataatcatagctcactgcatccttgacctcctgggctcaagtgatccttcctcctcagcctcctgaggatctgggactacaggcatgtgccaccatgcccagctaatctttaaaatttttctgtagatttgggatcttgctttgttgcccaggttggtctccaactcttgagctcaagtgatcctcctgcctgggcctcccaaggtggtactgggattacagatgtgagctactgcgcccagcctgtattattaatattattgagatggagtctctgtcacccaggctggagttcagtggtgtgatctcagctcagtgcaacctctgcctctcaggttccagcgattctcctgcctccaccacctgagtggctaggattataggcgtgcaccaccacacccagctaatttttctatttttagtagagatggtatttcaccatgttggccaggctggacttgaattcctgacctcaggtgatcctccgatcttggcctcccaaagtgctgggattacaggcatgagccactgcacccagcctgtattactgtatttaatatgcaacctggcttctgaatttctccctgtaacctcacttcccactgagtcctcttcgttcactcacttcagccacaccaacctcttccttcaaggcaggcatgagtcttaccccagggcctttgaacttgttgttctcctgctgtggggccctccttcccctccttagtcaagcctgctcttatcaccctgtttaaaattgcaactcccttgcgcgtctctctcactgcttattcttcatagcacttcatttttgacatgccatctattttacattgattttattttattttattttatttatttatttttgggagggagtctcgctctgtcacccaggctggagtgcagtggtgcaatctcggctcactgaaagcttcacctcccgggttcacgccatcctcctgcctcagcctcccaagcagctgggactacaggcgcccgccaccacacccggctaattttttgtatttttagtagagacagggtttcaccatgttagccaggatggtctcagtctcttgaccttgtgatccacccacctcagcctcccaaagtgctgggaatacaggcgtgagccactgcgcccagcctgtttttattttttgagacagagtcttgctctgttgctcaggctggagtgcattggtgcaatctcagctcactacaacctctgcctgctgggttcaagtgattctcctgccttgttgagacacataattcacatatcataaaatccagccatgtaaagggtacaatgcagtggtttttagtatctccacagagttgtgcaacggtcatctctgtctagtttgagaacattttttctcaccctaaaaggaaacctcatacccactacgaagccactccccatcccctgctcctcccagccccagcagcctttatttcgcttcctgtctccatggatttgcctgttgtgggtaattcacataaacatgatcgtacactagccgatctttttgtgtctggtgtctttctctctgcgtcatgttttccaggtccaccgctgctgcggcgatgcctcattcctttttatggctgaataatattccactggatggatggaccggattttgttgatccattcatccgtggatggacattgggtccattcccctttggctattacagaagctgcttggtggctgtttctttagccaggtggaaggtggcatttccagcccctctctgcccggggctgctcttccactgtgctctctcggcacccacgggtctctgcctccctcctccctctattcctctcttccctcctcctcctgctctttctttgtgtatctccccctcccccagcctcagccaagagagagtgagtctggaagtaatttccagggagcccggggtaggccctgaggcagctctgctcccccctcagggaggcctcagcctgccctgaacactggccccaggggagggacagaagggacagcctgctgcttcttcagctcccgggaaggcatagggagagggccaagcctgggaaacagcttttctctgggctttaaaaattgtgtgcatttatttgatttttttggaatagggaacacatgctcaagtataaaactcagatggtaccaaggatttctagtgacaagtctcctccctcccccaactcccagccacctatacccacgtcctcttcccagaggcaacatggttaggatttttgggcctcctttcaaagagatgttctgtgcatgtgtaagcatctctgtcactcgctctctctgtttctctctctctctctgtcacacacacacacacacacacactttttaaggcaggtttgttttgttttgttttgtttttgagacggagtctcgctctgttgcccaggctggagtgcagtggtgcaatctcggctcactgcaacccccactccctggttcaagtgattctcctgcctcagcctcccaagtagctgggattacaggtggccgccaccatgcccggctagtatttgtattttcagtagaaacggggtttcaccatgttggccaggctggtctcgaactcctgatctcaagtgacttgcttgccctggcctcccaaagttctggtattataggctggagccaccatgccctgccaacagcaggttacattaataccattctggcctttgtttttccttttcaaaaatgttttaatgtttttgagacagggtctcgctctgtttcccagactggagtgcagtggtgtgatcacagctcactacaacctccacctcctgggctcaagtgatcctcccatctcagcctcctgagtagctgggactacaggtgtgcagcaccatacctgactaattttttttcatattttttgtagagatgaggtttcatcatgttgcccaggctggccttgaactcctgacctcaagcagtccacccctctctgcctcccaaagtgctgcgattataagtgtgagccatgatgccttgcaccccaccctgcatttttttttttttttttttttttttgagacagagtctcgctctgtctcccaggctggagtccagtggtgcgatcttggcttactgcaagctccacctcccgggttgacaccattcttctgcctcagcctcccgagtagctgggactacaggcgcccgctactacacaccaggctaattttttagtatttttagtagagacggggtttcaccgtgttagctaggatggtctcgatctcctgacctcgtgatcgcccgtcttggcctcccaaagtgctgggattacaggcgtgagccaccgcggccagccaattttttttttttttttttttttttttaagagacagggtttctctgtgtcgccctggttggagtacagtgtggcaccatcatgactcattgcaaccttgacctcctgggctcaaggaatcctcctgccttcagtctcctaagtcactgggactacaggtgtgcaccaccacgcccacctaatttaaaattttttttgtagagatggggtctagctatgatgcccaggctggtctcaaattcctggtctcaggcaaccctcccacctgggcctcccaaagtgttgagattacaggcgtgagccaccatgcccagcctgctgttctttctaacaacatatcaagaggctcttatttaccaggctcagcctctttcacagtggcatggtattccactggaaggccctaacctcttgggccagtcctgctttgccggacacctaggttagcttcactctgtcataaggctacattattgagcatctctgtgattcacatccaaaaatgagagtaacatttatccctttgttaacttatttgacagtaatttactgagctcctattgtattgtatacctggcagttttgggagtggggatgtgacatgaacaagtcaaagatccctggctgggcacaatggctcacgcctgtcatcccagcacattgggaggctgaggcaggcagatcacttgaggacaggagttcgagaccggcctggccaatgtggcaaaaatctctctactaaaaatagaaaaatcagccaggcatgatggtgtgtgcctgtaatcccagctactcgggaggctgaggcaggagaatcacttgaacctgggaggcggaggttgcagtgagccgagatcatgccactgcactccagtctgggagacagagtgagactgtctcaaaagaaaaaaaaaaaaaaaaaatccctgcctctggggagctgacctgccagtggaggatactcaaagttgggctcatcagactgtactgagtgctgtggaagaaaacagagggaatgggggcagagagggctggcggtgtgggtggtcattgtaaccggcccttgctgaaaaggtgacatttgaacaaagacctgaaggaggcgagggagcaagccccatcagtgtgaagccctgtcagggttcctagctgcaagaacagcaggtgcaaaggtcctgaggcagggatttgaaaacacttacccagtggcacagccagtaagtggtggagctggggtttgaactgggtagtctggagtcagagtcagattttttttttttttttttttttgagacagagtctcactctgtcacccaggctggagtgcagtgacatgatcttggctcactgcaacatccgcctcccgggttcaagcgattctcctacctcagcctcctgagtaagctgggactacaggcacccaccaccaccatgcctggctaatttttttttttttttttttttttgtatttttagtacagaccgggtttcactgtgttagccaggatggtctcggtctcctgaccttgtgatctgcctgcctcggcctcccaaagttctgggattacagacatcagccaccgcacctggccagttttttttagtaaactttacttaggtataatttatgtacagtgtgacacacccatttaaaaagtatcattggatgcaatttgataaatgtgtaccattattaaccatcatcacgatcaggatacagaatgtttctgttaccccaaaaggatcaataatgcccttttgtaatcaatcctccctaccccctggctcaggcaatgcaaaaatctctgctttctgtaactatagattcaacttgtgttttctaatcagcacattcagggagtgtgtgatgcctccagcttttttcttagaatctcacctgtggtcctagctacttgggaggctgagacgggacagtcgcttgagcccagcagttggagctatgatcatgccactgcactccagcctgggtgacagaccgacaccccatttcaaaaaatataaaataaaataaaaattcagctattcagggcagggtcttttgtggtttcataggaattttaggatttttttctattcctgtgaacaatgccattggaattttgatagtgattacattgaatctatagaccaatttgagtaatatatatatattttttccttgcaatattaagtattccaatccatgaacatgggatatctttccatttatttgtgtcttctgtaatttcttgcatccatgtatcatagttgtcagtgttcagatctttcacttccttggttaaatttaatttaatctttttgatggtattgtaaatgcgattgtttcttaagtccttttttggttaggttcgttgttagtgtgtagaaacaccactgatttttccatgttgattttgcaactttctgcaatttcaatttgtctgttctagagtttgacataaatagaatcacacagcatgtactcttttgtatcaggcttctgttgctcagcatagtgattttgaaattcatctatgttatgtgtaccagtagttcattccttcttttgctggcaatatgccattatgcagatataattttttcatccattcacctgctgatggacctttgggttatttccagtgtttggctgccatagatgatgctgcttgaacatgcctgtacgagtctttgtgtggacctatgctatcatttctcttgggcaaatacctagaagtggattagtagggtcagatgataagggtatgtttaattttgttagaaactgcccacctgggcgcagtggctcacacctgtagtcccagcactttgggagactgaggcgagaggactgcttgtgcccaggagtttgagatcagcctgggaacatggcaaaacccagtctctaccaaaaatacaaaaaaattagccaagcatggtggcacgcgcctgtagtcccagctactcgggaagctgaggcaggaggacctcttgagccctggaggtggaggttgcagtgagccaagatcatgctactgcactccagcctgggtgacaaagtgagaccctgtctcaaaaagaaaagaaaaaagaaaaagaaaaaagaaagaaagtgccaaatatttttcaaagcagttgtttaccaccagcaatggataagcattccagttgccccacatcttccccaccacttaccattatcagtctttataatgtcagacgttctaacgggtatgtagtaatatctcattatggttgtagttttaatttccctgatgactaaagatgttgaacattgcattgatttatgggctgtttgcataccttcttttgctcattttaaattggatcatttgttgtctcttttgagacggagtctcgctccaggctggagtgcagtggtgcaatcttggctcactgcaacctctgcctcctgggttcaagtgattctcctgcctcagccttctgagtagctgagattacaggcgccctccaccatgcccggctaatttttgtattttttgtaaagacaaggtttcgccatgttggccgagctggtcttgaactcctgacctcaagtgatctgcccacctcagccttccaaagtgctgggattacaggcatgaaccactgtgcctggtctggaattcttttaaacagccctttttctggatgctaaaaattgacctacaaaagtaactctgtaaccaacccaaatacatctggggccccggtgtgctgcccctgactgacaaagtgaaggctttgaatgtggctctttctgcatcctagcggctcagtccaggccctggaggggcatctgtcacctgggacactggcagcatccctggcatccagccatgaccatcccttctcacggcggggctgctcacggtgctgtccctggggtccctggcattaggctgtgatgaggtactggggacaccagcctcccactgggtggctgtggacagaagagctcagcagaagccacactgtctgactttgagcagcctgtaggttagctgagaaaacaaggcatacattttcatggttttgcttttctcgtggtggccctaacagttaacatcggttgtttgccatatcgggctctggactcacgaaatcctgaaatggccccggaagcatgggcaatgctgagaatatttaagcgtccagagccccaccagaacccaggctggctgcgagactaccacatgcgtgttcagctggaacaccactgacctgggggggttaattctgttccgatgtccattttgtagacctagaaactgaggaacagagagggaagtaacttgcttcaggttgcacagccaggaggcacagagcatgatatagagagacctttacctacattcaccaaccttttatttatttctttattttttgagacagagtcttgctctcttgcccaggctggagtgcagtggggggatcatggctcactgcagcctctacctgctgggctcaagggatccttccacctcagtctcccaagtggctaggactacaggtgtgcccatgatgcccagctaattatttcttcttctttttttttttgcagagacttaggtgcccaggttggtctcaaactcttagcccttagcctcaagtgattctcctgcctcaggctcccacggtgttgggattacaggtgtgagccactgcacctggcccagattcaccaacttttaatattttgccacatttcctttcttttattttctttgcttttccttttcttttctttctttctctctctccttccttgcttcctccctccctcccttcctccctccctccctccttcccctcccctttccctaccccttccccttcccctaccccttcaccttccttttttttctttctgatggaatctcactctgtcactcaggctggagtgcagtggcacactctcagctcactgcaacctctgcctcttgggttcaagcaaccctcctgcctcagcctccagagcagctgggattacaggcgcccgccactatgcccagataagttttgtatttttagtagagatgaggttttgctatgttggccaggctggtctcaaactcctggcctcaagtgatccgcctgccttggcctcccaaagtgctgggattccaggcgtgagccaccgcgcccggatttcattccatatgcttttatttctacaggccagtagagcaaaaggttttctgtctgcaggtctcagtttactcttaaggaaaatgaaccagtttcacctgaactctacacacacacacttcctctttctctctctgtcctgtgtttctcctaaacgatttgagagtaggaatgacacgaacgtgcatttccaaagaaccattctcttatgtaaccacaggacagttatcaaatgcaccttgttgaacattgattgatacaacaccattaatgcagccactctccgtattctggctctgtcagttctactaacgtccctcagagccgtatcctccccaccccgatgtaggatgaggtttggaatcacgccagttgcatttacttgtctggtctctttcagtcccttcattctggagggtttcctcagcctttctttgtgtttcatgacgttgacattttagaagggtccaggccagttattgtgtagaacgtctctcattttcagtttgttggatgtttcctctcagtgagatccaggctacgcatcgctggttggaatttccagagcctgtgttcttaaccaccctgaggttctgcctttgaaagggacattctggttcctttccaaagggctggtcatcatcttgtccttgttctggcaggtggtgcgttcagctggacaacccgctgcattcataatattggggtcatataatttcaagaaaaggttaaagaaaaatggtctcttaacatgaaaaggtcatagaggatcattagaaggagcaaaagaggaaaggggagggagcaaaaaagaaactggaatatacaaagttccaaaaacgcagataacacaaaagtagcttgtaatcctgtcactcctggggtagagcaagtatgttaatgtttgggcatatttccttctgatcttccttctgattggctcttcctcttgccctcaggcattcagtttgcacagttgacaggagagacatattttgagagctgaagactgagattccaggtgcagtggctcacgcctgtaatcccagcactttgggaggctgaggcaggcagattgcttgaggccaggagttcaagaccagcctgagcaacagagtgagaccccgcctctacaaaaaattaaaaaagttagccaggcgtggtggcatgcgcctgtaggcccagctatactggaggccaaagcaggaggatctcttgagcccaggaagttgaggctgcagtgagccatgattgtgccactgcactgtagcctggttgacagagtgagaccctgtctccaaaaaaagaaaaacgtagaaagaaaaaagaaaactcagggcaggggggcgtcagccagggaggtgcattttgggatctggcagggggtggaggaggggtacgtccagcatgcggaatgctctgcccactgagggcttgtgtccccagacctgggatttctgcctcacagtgtggacaccagggtcctcaggggagcagagatgggtccctgctggaaacttccctatgtctccagagcgcctgcaaaaatctccagaaatcgccagcccctcgtgagtttggagtggaggcttttaatcaagtccaagggatcagctcagcccgacacacatgcacacagacacacgtgtgcgcgcacacacacacggctgaaacaccatgcttaagaacatttctcccatgtgttttactttttgagccttagcccggggatttgagaataacagctattcctgagagtacttcccgagcacatcctgggagctcaggtcacgcacttcacccgtattaattcgtttaatcctcctgacagtcccttgaaggtgagactgttactatcagaaatggaaattgagacacagcgaggtgaagtaagtcaaggattcctacagaaaagtgtaaaatatgctcatttcatccagcaattataaagtaacactctcacacacagttattccttttttttaacagctttattgagatataattcacataccatacagttcacccatgtaaatcgttcaccacagtttatagtgtgtttgcagagttataaccatcaccataatctattatagaacattttcctcacctcaaaaagaaactctgcatcccttagccatcatccccactccttctccccctcccagcctccagcaaccacaagtctactttctggctctgtgaatttgcctattttggacatttcgtggaaacagactcttacacgacgtggccttttgtgcctggcttctttcactcagcgtgatgttgtcaaggtccctccgtgtgtgtcagtgtctcatcccttttcatggctcagtaatactccattgtatggataggccacattttgtttatccgttcagttggtggacattggaggttttttttttccagtttgcactgttctgaatgatgccgtatgaatgtttgtgtgcaggcttttgtgtggacacttgtttccatttctcctggtttctacatgggagtggaattggtgggtcacagggtaactgtgtgttaacctactgagaccagccagactcttccacggcagcggcacccttgtatatcgcccagcaatgcatgagggctctgatttctctatcattttgatgattcatccattgtcctgttgataggatctgggttgtttcagtttaggggtgctatgaacattctagaatgtgttttgcggtccacctctgccccgctatgcataaagttgggattccatagacagtaggtcctgttaggtaacaggaaaaatgatctgtgggctcctctctctccttggcacgtgtgtgtggcccacgttgcatgttcttgtagaatcctccttcccgggtgaggattggaagccatgatcgcctgcctctgttgctggttttagtctttaacccttgctctgtggacttgagaaatgtgcttttccatggtgcctgtgaccaagatgtccgcatcgttagtgaagaccctgctatgtccttgaccacactgcacggggatcctgtccacgatggggggtgtcctgttgggcttgagtgtctagatatggagaccgtagttcgcggggggagtggggggccgtttggcatatttgccctggcatttggggttgtttattgggggtgggagtgctcctggcatttcctgggcgggaactactggtgtagacctactggattaacttgctcctgggtcggtgtgcgggatagggggagggtgcatcagtctttgtggagcgtctgccttctctccgtctccctgttttcctgttaccgtctccccgtccctctctctgtctctctgaactgctcgttccctccttgccttctgtgccgatgcccagttgaactgcccatccctatagattgggcgtctctgagcccgcagtggctgcctgagctgtaacccaccccgtgccctttcacctcctctcccgcctccagctgaccaatccctggggtttctggtcggcctgtggatgtgtcccggtcaggcctaggtcaggcgcctgacagcgtcacctgtggccactgagaatcatcctccttcaggagtcccagtcagtcaatatttacacaaagcgaacaaaaagaaacctggagctcaccactcttgggggagccaggcaggagctaagataagtcccatttatggcctgtcagatagcgatcggcacctgcagtaaagcaagcaggagagggactgggggagggcttgtgactacagacggccctggtgacactcgagaaaaggaagggcatggctgggagtggtgactcatgcctgtaatcccagcactttgggaggctgaggtggtggatcacctgaggtcaggagttttttttttttgtttgtttttttttttttgagacagagtcttgctctgccacccaggctggagtgtagtaggctgatcttggctcactgcagcctctgcctcctgagttcaagtgagccctgggctctcctccctcagccccctgagtagctgggactacaggcgtgcaccaccacgctgggctatttttttttttttttttgaggcggagtctcactttgtttcccaggctggagtgcagtggcacgatcttggctcactgcaagctccgcctcctgggctcacgccattctcctgcctcagcctcacaagtagctgggactacaggcacccaccaccacacctggctaattttttgtatttttagtacagacggggtttcaccatgttagctatgatggtctcaatctcctgaccttgtgatctgcctgcctcggcatcccaaagtgctgggattacaggcgtgagccactgcacccggcctaatttttgtatttttagtagaaatggggattctccatgttggccaggctggtctcaagctcctgacctcaagtgatccacctgccttggcctcccaaaggctcggattacaggcatgagccactgtgcctggcctgtatgttattaatattattgttaatcttttcatttatttgtgagcgctgttatatgccctctgtatcttttgtgaggattaatttagttaaaagttgatctcataatatataagtcaacacaatcagaaattcaaacaggaacgtattgacaagcaaaggaatgttactgtctctgcctcgaagatcttgtgtcctgcctggagacacttcacttccccactcacctgccactgtctgctcagtgtcaatgtattgattacctgtccaacagaatctattttatctctgaggttagggaattagtagaaattgatatcctactaatggaatagaacagagagtccagaaggagaaccaggcacattaagacatggtatgaggtcgatatggccaatggtcagatttgtggggaaacaagggactcataataaatagaggtagggatcaaaagtaaaaaggtcatccacaggtggaaggagatgaaatcagatccctacctcacactgtacagcaaagccaaccccaagattattgagtactcaaagtcaaatataaacttggaagctgcttagactttggggtagggacagattctgaaatgagatttaggttagtgtaaaagtaattagattttttgccattaagtgcaaaagtaattgcagtttttgccattactttttttttttgagacagagtctctgtcgcccgaactggagtacagtggcacaatatcagctcactgccacctccacctccagggctcaaatgattatcctgcctcagcttcctgagtagctgggatttacaggtgcatgccaccatgcctggctaatttttttgtttgtttgtttgtttgttttttgaggtggagtcttgctctgtcacctaggatggagtgcagtggtgcaatctcggctcactgcaaccctccaccacccagggtcaagtgattttcctgcctcagccttccgagtagctgggattacaggcacctgccaccaccccggctaattttttgtatttttcatagagacagggtttcactatgttggccagactagtctcaaactcccgacctcgtgatcctcccgccttggcctcccaaattacagggctgagccacggcacctggccaatttttgtattcttagtagagacaggatttcaccatgttgactaggctggtctcgaactcctgacctcaagtgattctcccaccttggcttcccaaagtgctgggattagaggtgtgagccactgtgcccggccagtttttgccattacttttaatggcaaaaggtgcaatgatttttgcaccaacccaatataaaaggtgttgctctgagagggaggtgtggagttcttgcccatagctgccacttcagtatttctccttctctgaggctctgggcagccctccctgctgtgccctggattggggtcatctcttctcttaataaggtgatcagtagctttgggaccagcagaatgcattagagggaaatgggcttcactgaagagggcagtggatgagaggaaggagcatgtgtgagggcttgtgtgcaccacacatcctgacaccatccgcccagcccgcacagcctgacaccatctgcccggtccacccatcttgacaccatctgcctggcccacccggccttctcaaatgctggagggctcttggctctgctgttcccttacactccttggccaatccatctgcaaaccctcttgctctgctattatgtccagaatttgactgcgccttgtcccctccgctgtcaccatgtctcctgcctggaccattaccgtcgccccctctctgtgcttccgtcctcaccttctgcagtccgttctccactctacagccagaaggaacctgtgaacacccaagtcaggtcatgtccctgccctgtccggagccctccctcagccctgggctcacctggaataaaagctgaagtcctcgccctcgttgtctgtctgacctcgcctctcctgcatgcctactcatgctcacgccctcatcactgcccgtggtccctgaggcgcccacgtgattctgcctcaggaccattgcatgtcctcctccttctgcctggagcccgctctcctggggtggccacattgctgctccccttacctcctgcacatcctgtatgtaccccagccctccccaacccattcttggcatccttgccctcatcttctcctcgggacgctgtctcttggttcagggtctgactcctgccggtagaacgtgagctctgggagagcagggatgacttcctcactcccagcaccatcgggaaagcgtttgacttctctttgtggagcagtagggatcagtagggagccctaagaaggggaacagcacgatcttaaataaaataggtcgctctggccaccaagtggggaactgagtttagaagtgggaggtcagttagaagtccctgccaccctccaggcaacgagcacgagagggttgggcagacaatgctggttccaagacctagagaagggtgggctggagttatttaagagacaggaggaatggtggcatctttgagccaaccagcgttggctgattcccacagatggcgccactcctggctgtgatgtggctgcaaacccacggcttgcccgggacctgctctgggacaggaacgtttgaaccgcaccaggtcagcatctgaaggtgtttgctgtaagacccaggcctgtgactctgccagcccaaacccctgccaggtcctgggcagatgtcggcctgctgtcacttctctggactctaaggcttttttgcctgtgtggcatgtgagaaaaataggggagtgattaggaaggctcatgcagaatccaggtaaaaaactatttcaggtatggaagggtggaggggaggaaggtcatctggagtattttttttgagacaaggtcacccaggctggagtgcaatcgtgtgaccatggctcactgcagcctcgacctcccaggctcaagcaatcctcctacctcagcctcctgagtagttgcaatcagaggcatgtgccaccacacccagctatttttttaaaaaattttttagagaacagggtctcactatgctgcccaggctggtctcaaactcctgggcccaagtgatcctgctctcttggctcccaaagtgctgggattacaggtgtgagccactgtgcccggcctgtccagactctgtatagacatcagcagtcaggcagtgtggcatcttggaaagcagccaaggctttggtgtccaagaatcccaggttctaatctcattgcttcctcttactactcgtggctttttagcttgtgtgcattcggctgcaagtaacagttgacttgaccactgatggcttaaatactctcttatttttttcaacaaatatttctaaatttagtttttgagatggctaattcaccaagctgaaaaagcaaaaattattttgaaaactatgcagtggaacacctcctattcctgttccgatctgccaggtcccttcatagttagtcattgtgtttagtgtcatatacacccttcctgaagttctttaggcattgaaaagcattcagaatatgtatcatgtctccttcacccttttcttaagcagatggtaacgttttacacacacccttctacattttacttttccatgtagcagtagtctgggcgatctttccctatcagtacacaaagaacgtcctcattctttttttttttttttttttttttccgagacagggtctcgcgccgtccgccaggctggagtgcagtgttatgttctcagctcactgcaacctccaccttcactggctcaagcgatcctccgacctcagactccagagtagctgggattacaggtgctcaccaccacacctggctaatttttgtattttagtagagatggggtttcatcatgttggccaggctggtctcaaactcctgacctcaagtgatccgcctgcctcggcctcccaaagtgctgggattataggcatgagccactgtgcctggcctcattctatttttttttttttcaaggacatctttactgacatattcacataccataaaatccacccatctaaagtgtaccaattcagttgttttcagtatattcacagagttgtgcagacatcaccacaatccattttagaacattttcatcatctcaaaaagaagccgtactcatgagcagccgctttgaatttctccctccccgcagtccttagcaaccacgcatctactttcggtctctctgggtttgcctattctggacattttgcataaatggaatcatggaatatatggcctttgtgcctggctcccttcacttggtgtcatgcgttccaggttcatgcatgttggagcgtgtgccagtgttccttccttcttatggcggagtaatagtctgtgatatggatacaccacatctgtttatccgttcatccacggacgggcatttgggttctaccttttgcttcttgcaagtaaaggtgctgcggatgttcacaggccagcctttgttttgttttgtttttttgaaactgagtttcgctcttgttgcccaggctggagtgcagtggcgcaatctcagctcactgcaacctgtgcctcccaggttcaagtgactctcctgcctcaggctcccgagtagctggtattacaagcgtgagccaccgcacccagccttgggccagtttttgtgtggacatatgttttcgactctcttgggtctataagtaggagtggaattgctgggccacgtggcaactctatgtttaacttttggaggaactgccaggcgggtttccacagcagctgcaaccttttacagtcctaccgacagtgagtgagcattcgtgttccgccacaccctcacgaacacttgcccttgtctgtctctttgatttgagctatcctaatggatgcgaaatggtatcctctggttctgatgtgcacttccctggtggctaatgatgttgagtatcttgtcatggccatttgtatacctctttcttttttgtacagctgcatactattcccctgtttagagaaactgtagttgatttaacctgtttactactgcaatagtcctgcccaagaaattaaaaaaaaaaaatcaacctgtttactactgatggccagtgggttgttcccagtatcttgctattattattattattattttttgagacggagtctcgttctgtcacccaggctggagtgcagtggcacgatctcagctcactgcaagctttgcctcctggtttcacgccattctcctgcctcagcctcccgagtagctgggactaaagacacctgctaccgtcttgctattattaatagaaacataactgtaaggccagggcatggtggcttatgcctgtaatcccagcactttgggaggctgaggtgggaagattacttgagcccaggaattcaagaccagcctgggcaacatagcaagactccatctctatgaaaaaaaaaaaaaaaatcacaaaacaacacacctgtaaaagcccctaactgtataattttggtcgtgtcaatggtacctgcaggatatgttcccataagtgaagtagccaggcagagggtgaatgcgtcttgatcttagtgggtattgtcatgtgcagggggtcctcattattccaagatatcatatttgcagatttcatctaatcgccaacgcttactcataaccccaaaatcaataacgcacaatgcttttcccatcatttatggacactcacagaatagcaaaaaatttgagtcacctggtgcacacatctccagctgcagtcaagcaacgccacaccctgctttcttattctcttactataaacaagtgtcctttttgtggtctagttagtgccatgttttctatatttttgtgctttgtgattttgctgtttaaaatgtccccagtttggccaggcgtggtggctctcacctgtaatcccagcactttgggaggccgaagcaggtggatcacctgagatcaggagttcgagaccagcctggccaacatggtgaaaccctgggtctactaaaaatacaaaattagccgggcgtggtggtgcatgcctttagttccagatacttgggaggtggaggcaggagattcgcttgaacctgggaggtggaggttgcagtgagcaaagatcacaccactgtactccagcctgggcaacaagagcaaaactctgtctcaaaaaaaaaaaaaaaaaaaaaaattagtaaaatgtccccggtttaggacaggtgcagtggctcatgcctgtaatcccagcactttgggaggctgaggcgggtgaatcacctgaggtcaggagttcgagaccagcctggccaacacggtgaaaccccatctctactaaaaatacaaaaaaaatgagctgggcttggtggcgggcacctgtaatcccagctactcgggaggctgaggcaggagaatcccttgaacctgggaggtggaggttgcagtgagccgagatcgctgcactgcactccagtctgggtgacagagcgagactccatctcaaaaaaaaaataaaaataaaaataaaaataaaaacgtccccagtttagtgctgaagtgccgtctaatgtttctaagctcaagaaagctataatgtgaggctgggcatggtagctcacgcctgtaaccccagcactttgggaggccaaggtgggagaatcgcttgaacccaggaggtcgagaccagcctggggaacatggtgagatcctgtctcgacacacacacacacacacacacacacacacacacacacacactctgaataaataagtaaattttagaattagccaagcgtgatggcgcacacctaaggaggaccacatgagcctggaaggtcaaggctgccatgagttcttttcacaccactgcaccccagcctgggcaacagtgagaccctgtctcaaaaaaacaacgagaaggctgtgacgtgcctttcagagaaaatacacgtattagagaaactgcattcaggcacaagttagggtgctgctgacgtgaggctcagtgttaatgaatcaaaactatacattaaataaggtgtcttcgaacagaaacacacataagccaaggttttatattggttggtgaaagcattgtggccagaggctttcaggaacctaactttgtatttcccccaggagacatggttaatgtctaagtatttgctaatccaatgttcacagtcactttttagattctgtaatatatagaacacagccacctggaataacgatcaattgcacaggggttttttttctacatgctaggggtgctttactgggttctaatttatgtgcagtaaaatgcacaaaactgaagcgcgcagcttgatgttttctgacaaatattacctgtgtaagcatcactcagctctagctagagaacacgtccatcatctgagcaggctcccttatagcctttcccagtcattcctgcatccctcccttgaagcggccacacgtctgatatttttcccccactataaatcagttctggatattgtagatttgtttggttttttttttaagatggagtcttgctctgtcgcccaggctggagtgcagtgtggcgatctcggctcactgcaacctccacctcccgggttcaagaaattctcctgcctcagcctcccgagtagctgggactacaggtgcccaccaccacgcccagctaattttttgtatttttagtagagacagggtttcactgtgttagccaggatggtctcgatctcccaacctagtgatctgcctgccttggcctcccaaagtgctgggattacaggcgtgagccactgcgccgggcccatgttctagatctttacacaaatggactcacacagtgtgtagacttttgtgccaggcttcctttgctcagcatgatccatttaagacccatttgtattgttgctgtagaagtccttcattcccttttactgccaaactgtattctgtcgtgtggatgtaacagtgtattcatttacctgttgatggctttctgtgccatttacagttaggggcttttatgaataaggctgctgtgaaatttttttttttttttgagacggagtcttgctctgtcgcccaggctggagtgcagtggcatgatttcggctcactgcaagctccgcctcacaggttcatggcattctcctgcctcagcctcccaagtagctgggactacaggtacccaccaccactcccggctaatattttgtatttttagtaaagacggagtttcactgtgttagccaggatggtctcgatctcctgaccttgtgatccgcccacctcggcctcccaaagtgctgggattacaggcatgagccaccatgcccggctgctgtgaaaatttttgtacaggtgcttttgtggacatacttttcacctcccttgagtaaataccttggcgtgacattgttgggtcatagagttggtatatatttaactttacttaatccaggctttaattctcttctgggacaagatgtctaggagaaggccattccagggatgtttggcagctgaggattgtcaggccagtaggtcagtgtccctcttatactctctctctctcgttttttttttccctgagtctgttttgctagggaacctctgattctcttgaccttcccctcaggaatgcataatggctgctgcggcaccagtcattgtcattatattcatagcagtctttcaagcaaaaaggagagggagcaaacagtcttcccaagacaagattctgcctctttagccaaatgtgaaaactttcccatatccattctgagctgcaagggagtctgaggaagaaagtttctggccaaggagcaggggtctgcactcactatggtctgtcctctgttgaccaggatgttggggctggaagtgtttgtcagaccctgggcaacttctaaattagccttcctgagcctcagagaagactcggtgggaccacttggtcaggggcctggaccttgaccaggaactggtggcttgtgtttgatacaagaacaagaaccccagaaggaaaactaaagagacagaagcttctaggccgggcatggtggctcatgcctgtaatcccaacactttgggaggctgaggtgggcagatgacttgaggtcaggagttcgccaggcgtggtggcgagtgcctataatcccagttactcctgaggctaaggcgggaggattgcttgaaccggggaggcagagtttgcagtgagctgaaatcatgccactgcgctccagcctgggtgacagaatgagacttcgtctcaaaaaaaaaaaaaaaaaaaaaagcagcagcagcttctagaacagtggttcgcagagtgtggtctgtgccagcagcatcagcatcacctgggaactcattagaaatgcagagtctcaggccgcaccgggacctgccgattcccagattctcaaatctgtattaggaaccagtggtctacaaacccgtgcgcacgtcttggggaacgtttgttttcccctttgcttcccttagctgcatttttttcccctgaattcgaagcctgcttcgttgcctgatgacgtgtgagtccctgtgtccggtgaacataatcatttcttttgtatttccgccacccaccccgaatgcctgtactttaccctctcccagggtttttcctgtttctcataagccagcattgagaaaaatccaaacccttttgagatacctggttttcttggcaagactgcagctttatagctgtatttagaacagcgtcgaatggtgaaaagggaaaagagaagatgcataaaacatttctagtttgtaactacctgtataaaataggcttttaagagccagacatcagtcgctttatgagcaatctaagctttatggggcccactttatttggttaaactaattcaatgattttagagatctaaaggtcactaaaaataaagatggtgtagattttaattgctcttcaaattgctctttctctgtctttcccaacaggggtggaggtgggtgaagaatcaacatttttttccctgttttccttttctagctttaaaatagacacatcatgcaagcggctacatatccagggcccagccagctcttacggggctttttcatgcaattgaaaatggtgctttgtccgagagggcatgactctgtggtgtgtcctttgtatgaattgggaaaggggactcctttctccatgtggatgccacccttctctggggctcataggtgtgagcagaacctggactggatttgatgccccacttgcccctttgtctggattcctttgtgcagtgaacaacctgtgcagctgtacatggtggtgcatacacacacacacacacacacacacacacacacacacacacacacacacgttctcttctcttctctctttctttttcttttttgagacagggtctccctctgtcacccaggctgtggtgcagtggcatgatcttggctcaccacagccttagcctcccaggctcaagcaatcctcacacctcagcttcccaagtagctgggaccacaggtgcacactagcatacctggctaatttgtaaaattttttgtagagatggggtctcactgtgttgcccaggctacatatatatcttctatactctgtacgtattgtatgcgtctctgtcttagaaacttacatgtacattagtttcccattgtcgctgtaacaaataccacagatgcaggatcttaaaacagaaaactattctcgtatagttccagaggccctaagtccaaaatgagggtgttagcagggccactggggttgtcagagctgtgctccctcaggaggctctagggaagagcctagagccttcttcgcctggtccagcccccggagctctaggtggtccttggctcgtagccacgtgacattaagctttgcctccttcttcacatggccttctgttcttctgtgacttctcctttgctgttaagaggacatttatcataggattttgagcctacccagataatccaggacagtctcatctcaacattgttaatctaattatgtctacaaagacccttttttccaaataaggatggccacatccacaggttctgggatgtttacatattttttgtggtgggagccaccattcaactcactacaaaggccttggaaatacatcctaagagcttaacttctaggcgtcatagcatgttaagtccacgtaccaggtgaacacatcacctcatttgtctgtctgaccaaggttcacgggaatgactcattcgaggcatttcaggacaactaaagggatagaggacctggccgggtgagtggcagaggtggggaacctgttgtagtacacccctgctgtggggggtggagggagagatggccaggctggcatcatcatgtagttcccacgggcttaggagtctcagctgggttcaaatcctggctcttgggtgaccttgggcaagtacccaaccctttttggcctcagtctcctcatttgtgtaatgggcatgaggataatggcatctgccttatagtgttgctgtgagaatgaaatgataagatgaagcactttgccgggcgtggtggctcacgcctctaatcccagcactttgggaggctgacgcgggcagatcacgaggtcaagagattgagactatcctggctaacacagtgaaaccccgtctctactaaaaatacaaaaacaaaaaattagctgggcgtggttgtggcgcctgtagtgccagctactcaggaggctgaggctggagaatggcgtgaacccgggaggcagaggttgcagtgagctgaaatcacgccactgcacaccagcctgggtgactgagcgagactccgtctcaaaaaaaaaaaaaaaagacgaagtacttagtaagcattcagcaaccttggctggggtgacgaagatgatgaagtcagaggtggccgtagccaagggctcatgggacagaatctgacccatcaaatgcccagactcccaaacaccagggctcatagccacgtggcccaggcagaggttggactcgtagttggggcaggtccagtcggtggccagcgaggaagggggttcgcggggaggagcagaggccagagggagccgggccggggaggagggctttctatggtcgtttacacatggcatctcggtgtccagtgtggggcaggcatataggaggagctgaggctgcttgggcagcatttatttaccaatcggtaggtcagcttttgagtattttaatggcaggagcagccagatgtcaataagccaaatgtgaacccaggcttggtgatgagaaaatacatttactacatttgggccagaatagtggtcatggacaggagggcactgactggagagatatgggaggtgggatggataaaacttggatgagtcagatgtggggtcaaacttggttcctaagtccccagagagagctgtatcagtgagctgtcactacataacacacagccctggctgggcacagtggctcatgtctgtaatcccagcactttgggaggtcaagatgggaggatcgcttgagcccaggcatttgagacctgcctgggcaacatagtgggaccccgtctctgcaaagaattaaccaggtgtggtggcgtgcgcctatagtcccagctcttcaggaaactaaggtgggaggatccctggagcccaggaagtcaaggctgcagtgagctgtgattacaccactgcagtccatcctggccaacagagcgagaccctgtctcagaaaatcaaaataataataaacagaaaaaagaaaaccatgatcccaacggttagaatttggactgggcgtagctaggtgcttctggcctgggctgggtgtctgtagtcagctgttggacagctggtgactgcgtctagggcttggctggctgttagctggggtgatggggtgatgggcacgtggctctcatcctcttgcaggccagcctgggcttcttcacctggcagctgggcaaagactggaagtgtgccaggctcagaatcacacaccatcggccaggctccttggctcatgcctgtaatcccagcactttgggaggccgaggcgggcagatcacgaggtcagttcaagaccagcctgaccaacatggtgaaaccccgtctctactaaaaatacaaaaattagccgggtgtggtggcacgcacctgtaatcccagctactcaggaggctgaggcaggagaatcgcttgaacccgggaggtggaggttgcagtgagccgagatcatgccactgcactccagcctgggcaacaagagcaagactccatctcaaaaaaagaatcacacaccatcactttcaccacattctgttggccaaagcaagtcaagaagccagcccagggtcaagggctgaagtcatagaccccacttcttaataggaggagctgcaaagagtgtgggacgagggaggagaatttctggccactttgcaatcaaccacagtggcctttgtttcagatcccctttccaccagccctctcacattttgtttgacctctcttcttaatcagtgacccacaaagaacagcccttgacccatgtgagaggccttgccatgggttgcaaagaaaatccagaaatgggagctctttttgcgtcaggttgtatttgtctgcaaataatgggaaaccacatagtggcttaaaccataaggattaacaagtttggaggcgggcagcccatgaagagttatgaagagtacagtcaggccggcgcgatggctcacgcctgaaatcccagcactttgggaggctgaggcgggtggatcactagaggtcaggagttcaagaccagcctggctaacgtggtgaaccctgtctctactaaaaatacaaaaattagccgggtgtggtggcacgtgcctctaatcccagctactcaggaggctgaggcaggagtcacttgaacctgggaggcggaggttgcagtgagtcaagattgcgccactgcactccagcctgggtgacagagcgagactccgtctcaaaagaaaaaaaagaacacggtctttttgtcagctcccatcaaccatcctctgctggtgggcttttcagcctcaggtttgttgtcccgtggttgcaaaatggctgccacagctctagtcatctcaactgtattcaaaactggaagcaggagcaaaagactgtctttctggagaaactctgtctttgtattctggaaggaaaactttccctgaaagtctcactgagcagaacctgtctgtacacttcagtttttactatttgcacaactgtggttactctaactgcaagaaaggctgggaaagtgagtgtctgataaaggagataggaatgcctctggcttagttcaattattttaaggctattttgaccacaactcacagtccaaaatatgtttctttgtgtcgcagtacacacacacacacacacacacattattgaaaccaatttctcaaatactcactcttaccatgtatgatacacgttaatgtcttccattccattccattccatgcattttaattatttaaagcagttcctggtcacaacctgctaatttgatttcacaaccttcaaaggcatgacccatagtttgagaaagactggcctagaacagtctttgtttacatcttagcgttggcaagtgttaaccctgcacagagtcaggcttctgcgagcggaggaggagaggtggggaaatggtgttttgaaaagcaacagatagactttgccacatcatttgcacttcttatcagcaaatgatatcgttctggagactttgtattactggcaggcaacctgaggttactccaatttatattgggaaattaaaattcgcctgtttgtggagcttagctggcccttttaattccgtatcctgctagcagcctggcttctgcacagctcctgatgacagcgcaaaactccgattgcattacaagtggaggaggaattcacacaattttctggaaggacactgtgtcattgttgcgtcatggctgttctctggagctggttgtggttttcaggcccggcctttcctgctttttatagtgtggtggtgaagagtgaggtcttcagaatcacagggtctgagttcaaattctggtcccatggtgcgatctggggcaagtgtcctgaccacctccgagtctccttttcctgtaagatgtgcatcagcagtgcttccgtggggatggggagggatcggtgggtatggagtaagcacaggggctggtacccggaagcactcaggcaatgcgggctcttcagggtgtgccaggcagcttcggctgtgtgatgccacagtgacgagtgggcccgggtcgcagtggtccgtggtggcagaggctggcttctcgctcgtgtgtgtgcccgtggggggttggctgtggctctggccacatgtccgccctgttctggaactcaggggaactatgtgatggctcttgaagcttctgctctgaacagacacagtgcgcccactccatctcatggaaggagaatctttccgtaggagcaggcccactgggtggggggcagcggacagatggttaaaaagccagtgtgccacaccagggcttgtctccagggtgctggtgacaattttgggtccgcaaccctgcatactagttttcaacccccacccccccgcccccccactctgcaacctcagtcactgtttcaaaagtttctgagtgtggggggtaggggagaggtctccagcaccctccctggctgagaaccaccagctgtgctccccaagccagggatggggtctgcctctgcccttttgctgtcctcagcaccccccaccagacacacagtaggtgcctactaaatgtacatttcagcaggttgcctcttgaataaatgaaaggatttgtttaatttcctctgcaaattcattcattcatcccacagatatttattgagctcctactgtatgccacataatgtgccagccccagggatcttgcagaggacaaaacaagcaaaagttcctgtcctgggggacatttcggtagaggagacacacagtaaacaaccaaaccatcagacggatatatgatatttgatgttaaagttttggttttgttttttttgggatggggtctcgctgtcttgcccaggctggagtgcagtggcacgatcacagctcactgcagcctcgaactcctgggttcaagcaattctcctgcctcagtctcctgagtagctgggattaccggtgtgcaacaccatgtctggctggttgttttgtttttttttaatcttcatgtgtgtcttgaaaggcttcccctgccttctgggttgagagcagcaagacacctagctggcctggtgagggtgcacacagtgcaggtgccgcagcgcccccaaaactgctgttttccattgcgtttatctcatctggaaaatgggggtaataccagggtgtttggaaggattcaaagaaccctggtacctggctgaagcaggagatctgttaacccttccagatacacacacaggccatgtgcggcaaacagcaccaaagtggggccggggacttctgtccagcctcactgggctgtggcccaaaagctctgggagtcgccccattagatagcatcaacagtggcaattaaaatgatcacaactagcgtacacactgcttacaaagtactttagggcatggattagaggtgttcctatgtaacagtcccatggaggacgtagtgttatcctccccaaacggaggcacagaggggataagtaacttgtcttagggtacacggctgggaacgggaagtggcagcccagggatgggagcctcagaatcagtcaaggtgcacttgattcctgctgtgagcatgcacaggcagtaaccccagcccctcgcccaatttctttttttctttttctttttcttctttttttttttgagctctgtcatccaggctggagtgcagtggcgcaatctcagctcactgcagcctctgcctcctgggttcaagcaattctcctgcctcagcctgcggagtaactgggattacaggcatgtgccaccacacccagctgttttgtattttagtagagacaaggtttcatcatgttgaccaggctggtcttgaactcctgacctcagttgatcctcccaccccgccctcccaaagtgctggcattacaggtgtgagccaccacgcccggccttcttttctttttgaaatggagtctcactctgtcgcccaggctggagtgtggtggtgcaatcttggttcactgcagccttggcctctgtagctcaagtaattctcccacctcagcctcccgagtagattggaccacaggtgcccaccaccaccccctggctaattttaaatttttttgtagagatgagatcttgctgtgttgcctaggctggttctccaactcctgagtttaagccatcctcctgcctcagcttccctgccttggctgggattacaggtgtgagctaaccatgcctccctcctttttacttctttgaagtaaaattttcctgtgttgaaacacacaaatccgagctgttaaattctgaacactcacataaccacaccttggtcacaacacggactgtttccctctccccaggaagttcccgttcatgtcttttttcttttttttttttttgagacggagtcttgctctgtcgcccaggctggagtgcagtggcacgatctcggctcactgcaacctccgcctcccgggttcacgccattctcctgcctcagcctcccgagtcgctaggactacaggcgcccacccccacgccgggctcattttttgtatttttagtagagacggggtttcaccattcacacaatggtctcgatctcctgaccttgtgatccgcccgccttggcctcccaaagtgctgggattacaggcgtgagccacagcgcctggccctattcatgtctttagtgttgtcattggaatgaaagcacatgaatacaaaatcctcagagacagctctgcagcctccactttgaaattcaccctcgggactggtttgcagaagcctcacgggagctgcatcccctcctgtctctaattctgctggtaggtaggtcgtgcacagagcttgggccacgcctaccagagccagggaggaggcatgaacagacgtgaacccttcatcttgggagctcgtgcacaccttcaggccaggcaggaacagggcacccgcattccagaggaaaagaatcctgtgttccagggtcttgcgacatctgctttctagctctttctgggatcgggacctgagaggaagagagaaagccactcgccactcctgttccttcctcctccttccatgccagtccctttatctccttttccaatccgaagcatcccaggcattcataaaatgataacagagacgcacacccccatcacccagcctcgcgatagtgcctgaacattctgctgtatttgtttcagatcctacgagagaagtagcaggagagggtcgcctgttgggtagtggtgaagggcgaggcctctgcagtgagcctgcctgggctgaaatcccagcctgggtggggtgcggtggctcatgcctgtaatcccagcactttgggaggccaagggggcacagatcacctgaggtcaggagttcagaccagcctggctgacatagtgaaactctgtctttactaaaaatataaaaaattagctgggcgtggtggtgcatgcctgtaatcccagctactccggaggctgaggtaggagaatcgcttgaacctgggaagcagaggttgcagtgagccgagatcgcgtcattgcacccagcacccagcacatagtgggcccgcagtcagcgtggtttatcattgtcatagtcggtccttgttcttcacagatcccgtatttgcgaattcacctacttgcgaacattggtaaccccaaaacggtgctgatcatttgcagaagtgggtagagtggccaaaaaaattgagctgcctgacatgcaggttcccagctgaggtggggcctgatgtcttgtttcagctcaaattgcaaagcagtgtcgtttttgcaatctgtttagtgccacatttttcacatctttgtgagtctttttttttttttttttgagacggagtctagctctgtcaccaaggctgaagtgcaagtggtgcgatctcggctcactgcaagctccgcctcctgtgttcaagtgattttcgtgcctcagtctcctgagtaggcacgactacaggcacccgccaccaggcctggccaattttttctatttttagtagagactaaagggttttgccacgttggccaggctggtctcgaactcctggcctcaagtgatttgcccgcctcagcatcccaaagtgccaggatacaggcatgagccacggcgcccggctgtctttgtgcttcttattggtgatttctctgtttaaaatggctcctaggccaggcgcagtggctcactcctgtaatcccaacactctgggaggccgaggtgggtggatcacttgaagtcaggaatttgagaccagcctggccaatatgatgaaaccttgtctctacttagccgggtatagtggcaggtgccttatcccagctactcaggaggctgaggcaggaaaatcacttgaacctgggagacggaggttgcagtgagccgagatcgcatcactgcactccagcctgggtgatagagcaagactcacacacacaaaaaaataaataaaataaaataaaataaaatggctacaagcagggtgcagaaatctagtgttcctaagggcagtgaggctgtgatgtgccttctggagaaaatacctgtgttagagaagcttccttcaggtgggagttatagtcctgttagccatgagttcaatgtgaatgaatcaacaatatagattaaataagatggcttcaaacagaaacgcatataagtcaaggtgatgtatcgattgatgggtgaaaatacagtggccagaacctggcaagaacctagccttgtattttccccaggagtggcagctcagcgttcacggtgactttctagaacctcactactgcaaatagcaagaattggctgtattttgttatactgaagtgccagtaaatgacatagtataatgttatatactatgtgtatacatagtatataacactatatgttatatacactatagtgtatgtgctacatatatgtagtatatatatgggataatagtatgtatagtgtggttttgttctatttaaattattcttatttttatttttattttatttttttgagatggagtctcactctgtcgcccaggctggagtgcagtggcacgatcttggctcgctgcaagctccgcctcacgggttcacgcgattctcctgcctcagcctcccgagtagctgggactacaggcgcccgccagcacgcccggctaattttttgtatttttagtagagaccgggtttcaccgggttagccaggatggtctcgatctcctgacctcgcgatccacctgtctcggcctcccaaagtgctgggattacaggggtgagccaccgcgcccggacagatttttttatttttgagacagggtctcactgtcgcccaggctggagtgtaatgccactatcctagctcacagcatccttgacctcgtgggctcaagcgattctcctgcctcagcctctcaagtaactggaactacaggcaagcgaccatgcccagccaaaaaactttctttttgtagagacaagatctccctgtgttgcctagccacgctggtctcgaactcctgagctccagtgatactcctgcctcagcctcccaaagtgctgaatttacaggcgtgagccaccgcgccagccattttgtgtgattctaaattttttaaacttcccttgaatgttgccttttcagcctcccgtctctcttccatccccctcctttgtccatccctctcccacctacatcccatagctctgtccgtctctgaccacgtctttttccttttcgctgactttctcactcactgtctgtctctcattttctccacagctggcccccaagaggaccctttccaagtccccagctgggggccctgtgtagacctggagtggacacgcccctccttcccttcatgattcgtttgtagcgcaggtaaccagcgaagcatccctgttcattcctggaggggcaaccgtccctcattccacctccccagcaccaccttggcccctggatgaggaaggagcattccttcctggaagagcctggctaagcaatatctctggttctttcttctcccacctgggcctcctgggtcatctgggccatcaccctgcctctgcattagctgcaagcaaaatctttctctctgcccctttccccttttctccagattctttgcagaccatgcctttgcatgccttctgtgagcgggttggggagggaaggggctcataggtcatggacctggtgacacagggggaggaagcctggtggggctgggatgtggagcaggtggtgagagtacgtcctcaccacttctaaggcagcgagagcccgggaggcacctccccggggacactccccacagccagcccctgagaggtagagtaattggcgtgtggggctctggagatgcatgtgtctctgtgctgcagggagggtgatccgtgaaccctggaaaagtatgtgtcacatttcttacccacatgcatgttttggcatgaaacatgcgtgtgtcattagatttttcacaacttgattcagcaaatatgccccagcccactgtggggggtccctggtcagggctcttcataatgtcactgagcactggggatggaggacttgggggtggcactaaggaggcccctgttaggggagttcagagtatgctgtcagggtgaggggctgtgaaccagctgagggtgcatgtaagattttatatgtggggtttttgggtgggaatggtgacccgtggcagttgtcacatcgtcagtgaggtttgggaccccctaccccaacaaaaaaagagggtaagggaactccacggtcctgagctgtaaattcccaccattcagggatcaggtcttcttttccattgtgtattgtatgtgtcattgggaggagacgggagcagagggtgcaggaagtaatgaagggatgagtggctggaaggatgggtctgtgtgggtatttggcagaagggaaggaggggtgtttggatggaagcttggaaggatagagggatgggtaggtagatggatggaaggatggagggatgggtaggtagacgggtagaaggatggagggatgggtgggtagatgggtagaaggatggaggggatgggtaggtagatggatggaaggatggagggatgggcaagtagatggaaggatggagggatgggtagctagatggatggagggatgaataggtggatggatggaaggatgggagggatgggtaggtagatgagtggaaggatggagggatgggtaggtagatggatggagagatgggtaagtagatgggtggaaggatggagggatgggtgggtagatggatggaaggatggaggggtgggtgggtagatgggtagaaagatggagggattggtaggtagatgtatggaaggatggagggatgggtgggtagatggatggaaggatggagggatgggtggatggatggagggatcggtaggtagatggatggaaggatggaggatgggtaggtagatggatggaaggatggagcatgggtaggtagatggatggaaggatggaggatgggtaggtagatggatggaaggatggaggatgggtaagtagatgggtggaaggatggagggatgggtgggtagatggatggaaggatggagggatgggtaagtagatggatagatgaaggatgggtaggtagatggatggaaggatggaggatgggtaggtagatggatggaaggatggaggatgggtaggtagatggatggaaggatggaggatgggtaagtagatgggtggaaggatggagggatgggtaggtaggtggatggaaagatggagggaggaggagactgatggctagagggaggaaagaggaagctttggagggagggttggctagttaaatgtttctgagggctggttggatgtttggagaaatgtttggaaagataaagaagtggatggatggatggatggatggaggcagggaagggagggatgttttggagggttggaggaatatttggaggggtgtttgaggggagggaaggctagatggatgggagggtggatgggtaaataaatacagagaacacctgcttcccctggtgtcagatgggactaacgatcccttccctatgggggtggaacaagctaacattgctgaagtgctcagacagtgcctggcacctagtgagcactcgacaaatgttagccatcctcatcctcatcattcagaccatagggctcagccttgccccggtggcttctctgactcagagcgcccctcctcatgagcccctctcccttgcttctgcctcagtttccccaccaccctccccttccttgggaacacattgcagacatcttcaagggtcacccagagccttgagccacaaagcccttcttgtctacactggctccctcactccttcacccgtttatatgtaggacagacccccaccacacgcctcatgtctggggaggcaggacagcagggtggtgaagagcagggctcaggagccaggcttcctaggttccaggcctggctctgctgcctgcttgctgggagacggaggatgaccctcccggtgcctccagttctcatctgcaaagtacaggccgtgggacccctcctgggataccctgaggattagcttagtgtgtgtgaggcatggtcaggactcacttagtcttggttgatatcatcattatcatcatcaggtgctgggagagttggagtgggaggaaaaggaccctgtccctggtcaggggtttctggctgggagggcacctgggaggtattccttgtccccatctatccccatggactcaagggaacagaaactctgaccccctccagggggctcccctgaagggagggggccaggcaagctgccaaaatctaaccttgtctccctcgccctcttcctgaccccaccccatccagtggcgatggatgatgaggatgggagatgcttactagacgtgatttggtgagtaacgggctccccaccccctgccctctgtctcaaccccctcccttccctcccctccccagctccttacctcctcagcgtctcttcctcttctcttccagtgacccacaggccctcaatgacttcttgcatggatccgagaaggtaagcatgggcgcagggagaggcattccctgagtggggggctgtctaattgggagtgagggacagggagagacatgtccctttgatgaggtagccatctgccttgtggcttctaacgccaggcactggagttacggccatgagcaaaactcatggtaatcccctgtcctccttccatggacacctccttgggaaacaaagaaaccagtcactaataaaggtaatggtgaaaaggaccatgtagagtatgataaaaaataataatgtcatttgcacaatgaaagaggtttaaaagaaaataaatgggtcccaggggctcctttagatagtgtgatcagaaagggtcacacgagggaggtaacattgaaggtgagacctgaaggatcacagggaggtaggtggccaggcccggtgctcctggcagagggaagagcaagttcaaaggtgggagagagcttggcatggttgaggaacaggaaggaggctgatggggccaaactgaagggaaaactagtaggaggtgagactgtagtaggtaaaagtcaccaggttgtgtaggcctggaagcccgatagaggagttgttatttttattctgaatgtgacaggcagctctgatgggcccttaaacacgagaatgccatatttgatttgcttcccagagaacggaacaaaatggggaaaagtagaagtctgttgagctctgagcagctgtattagtatctatggctgtgtagattatcccagcatgcagtgccttcaacaattgttagagctcttgcagtgtctgaaggtcaggaatctgggagcagcttagctcggtggttcaggctcagggactctcatgaggttgcagtcaagctgtaggctggggctgcagtcatccaaaggtttgactggggctggcagatgtgcttccaccaggactcattcctgtggctgttggcaggaggcctcagttcctcaccacgggggcctctccttagtgctgcttgagtgtcttcacagcatggcagctggcttcccccagaacgagtgatccgagagaggacacaggaggaacccgcagtgcccttaatgacccagtctccaaagtcccacacccttcctcccatcacactgtattcactagaagctaatcagtcagtctggccagcactcagagggaggggaattgagctccacctcttgaaaggagaggtttcaaataatttatagagcagaggcatgagcaatgggatgatggcagcctgggccatggtgcaggcagtgggggaggcatgtggcactggatttgggatctatctgggaggtggcatcaactagacttgctggtggactcgatgttgagggggagagagtgtccaccatggctcctggattttggcttgagcaactgagtggattctggtgccattttctgaagttgggaatttggggaagattccagaagtccaggtggtgctggtggatgtacaagttggggttctggagagatgtccagatggaacaagaaattagggaagcccgagccatggacatacattcactgggcacatatgtggatgccagggcctgttctgggcactaaggatggtgctaagcatctgagaatgccctgcccttccagagatggcaccgcatggcttgtcaggtgcccggatggtaggtgtgccaggcactcaggctgcgttgggaaaggagtacttagtgagaagggacaggagctgttggaccacgagtgaccactcctgaaggctgtgctactggagagactggggggcagtggcagggcgcagcttgggcagaggcgtgaaggcaggattccggaattcgaggcagtcacagcaggatcgcttcgcaggccaggctcggggactcagtgctggggatgccttgggttttaggcaggcacccaagcccctgcctttggggcctcttttcggaggcgagagtttcccatacccccagccctctcccatcccaacccttgtctttttgtcctgagtgaccctaaattggtttctgctccagagcatgggcctgccctgctgacttttgaccttggatggggcgggtcttgttgcagcttgacagtgatgacctcctggataatcccggggaggcccaaagtgccttctatgaaggtcctggggtaagtgccgtggctcccgatcattgcctgagctgttggggctgccagcgggaggagggccctgaagccaagaggggaggcttgggctcatctcgtgagggctgttgacaggaggagggcgggggtgggccacccagggtggctggaccaccctggcagtgcaggagggagcagagctggggaaccctgtggggggccaacatggacaaggctgactgtgccttgcagaccccttggggaagaggtgagggtccccgaggccttggggccctggggtggctcatgcagagtggttctggggagctgaagcggatgtgggttgtggggttcacaggggcactcctggagagcagagggctgggggaggcctggggtcctgcccaactcagccatggcagggtgtgacctaggggaggggcctcctcacctgcagacttcagtcttcacctgggcagtgaatatgggtgctgagaaaagcccagagtggccaatgcagaggatgtttattgagcacctactgtgtgcctgactatgccggtcccatgactaagtgccagttgtccacaccacggtggccacctccttcctccttctccctcttctgttgctgctttccccccttcaccttttcctccccccaccttccttcggcctcccccctccccgcctccccttcctccttccccccctcaccctccccgccttccctcttcatcatcagaacacgcattcaccaaacacttattatacgaccagcccttccttgttatcttcatttagttctcacagctataatatcatattccaaatagcttatctttcataatataaatgatgaggaaatgtagtaattatataatgttggtctatttacaggcccagtaacagtggtgatcctgttactattttgtgatcacacttcttaccacgaccatcatttttgtataccctaagatccccattcaggttctaaacactctccacacgtgacatcagtgaattttcacaggcatcccaggaggcaggttggttgtgaccatctggcagttaagagctcagggggttacagtggcctgcctggtcctcagtcggttggaggctgagccagagccctgtctgcctgccactccccgccactcaccagtggttgacccaggcagttccctcgtctgtgaaatgaggaagggagcagcacccgcctcatgggactgtcaccaacaacagcatggagaatcacaataataatgagtgatgatgatagatgcttctcgagcacctgccaggggccgggtgataccgtgaaccctccatgtggatttactgagaatcctggaagctgcagattttgatgggttatctggtcagtattggtggagatggaaatctgtatcataagtattgtttgtggggctttccacacatatgcctgcagatatttttccatgcgtgtcctgggttgcagtccaggatagcatgaaaagcacttaaaaagcattgaggctgggcacggtggctcacgcctgtaatcccagcactttgggaggccgaggtgggcggatcacctgaggtcgggagttcgagaccagcctgaccaacatggagaaaccctgtctctaccaaaaatacaaaattagccgggcatggtggcacacgcctgtaatcccggctgcttgggaggctaaggcaggagaattgcttgaactcgtgggcggagattgtggtgagccaggatcacaccattgcactccagcctgggcaacaagagtggaaactccgtctcaaaaaaaacccaaagaaacaaaaagcattgaactcacagtgcggttggcacagaagttcacaaatgggagccactgctgatgtgagctttactccaccagaactacgactgcttgtcagaaacctttagggccaggtgtgtttcagaatttcgaatttctccaattctggaaaagtggtgccatatgtgtggtgtgtgtcatgtcacacgcttgcctttcggcggccaaacttgggatgtcacatcatgtggataaatggatcccacctaaagtgccatgttggttctggtcaggttttgctgccaacagagctatgaaaacagtctcagttcttagagctttttgggttttgtaattacagataagtgttgtgggcctatatcactatttaaacaatagttgcttatttttatttatttttgttttgttttgttttgagatggagtctcactctgtcacccaggctggagggcattggtaggatctcagctcattacagcctccacctcccaggttcaagccattctcctgcctcagcctcccgagtagctgggactgcaggcacgtgccaccacgcctggctaattttcgtatttttagtagagatggtgtttcaccatgttggtcaggcaggtctcaaactcctaggctcaagtgatccacctgcctctgcctcccaaagtgctgggattacaggtgtgagccaccgtgcctagactttatttttgttttttgggcgtcagctggtagagattgggggacagcacccccgcgggcttgggctggatgggcatgggcgtgcgatgcaggatcacgttgggcgccgggaccagtggtgacaagctgaggcctggggccaccaccagcggctttcctgagggtgccccgctgggtcttactcttgtcacttaggctggagtacagtgacacaatcatagctcaccgtagcctggaactcctgggcttaagagatcctctcacctcaggctcccaaagtgctaagattacaggcgtgagtcactgtggccttgaacagtagttttttttattacattttactgatgggtacagatgaagaaactgaggtcagatcaagcacgccctaggttacacagctaagccttggcagagctgggatttgatcccgggtccagccacttgcaggtggaatgttcttttttcttttttttttctttttttcttctttttttttttttcttctcaaagtcttgccctgtcaccgaggctggagtgtagtgaagtgctcgtagctccactctgcagcctcaaactcctgggctccagtgatcctctcacctcagcctcccaagtagctaagaccacaggcacatgctgccacccctgactaatttttcttttttaaaatttttttctcactgcgttgcccaggctggtctcaaactctttggctcaagccatccatcctcctacctcagcctcccaaagtgctgagattacaagcgtgaaccaccatgccaggagggaatgttctttcttgaacgtggctgccctgtcacctcagcattctttgcggcagctgtggcctaagcgtagccccttgctaacctcagctctttccttcccacctttcccggcctgcagctccatgtgcaagaagcttccggcaaccacctgaacccagagcccaaccagccggcccccagtgtggacctagacttcctggaagatgacatcctgggctctcctgcgacagggggcggcggcgggggcagtgggggcgctgaccagccctgtgacatcctccagcagagcctccaagaggccaacatcacggagcagacgctggaggccgaggctgagctggacctgggtcccttccagctgcccaccctgcagcctgcggatggcggggcaggcccgacgggcgctggaggggcagcggccgtggctgcggggccccaagccctcttcccaggcagcaccgacctgctggggctgcagggcccgcctaccgtgctgacccaccaggccctggtgccgccccaggacgtggtcaacaaggccctgagtgtgcagcccttcctgcagcctgtgggcctgggcaatgtgacactgcagcccatcccgggcctccaaggcctgcccaatggcagccctgggggtgccacggcggccacactgggcctggcgcccatccaggtggtgggccagcccgtcatggcgctcaacacgcccacctcccagctcctggccaagcaggtgcccgtcagcggctacctggcctcggcggctggcccctcggagcccgtgacgctggcgtcggccggtgtctcgccacagggggctggcctggtcatccagaagaacctctcggccgctgtggccaccacgctcaatgggaactctgtgttcggaggcgcgggggccgcctcggctcccaccgggacgccctcgggacagccgctggcggtggccccaggcctcggctcgtcgccactggtcccggcgcccaacgtgatcctgcatcgcacacccacgcccatccagcccaagcccgcgggggtgctgccgcccaagctctaccagctgacgcccaagccgtttgcgcccgcgggcgccacgctcaccatccagggcgagccgggggcgctcccgcagcagcccaaggccccgcagaacctgacgttcatggcggcggggaaggcgggccagaacgtggtgctgtcgggcttccccgcgcctgcgctgcaagcgaacgtcttcaagcagccaccggccaccaccaccggagcggccccgccgcagccccccggggccctgagcaaacccatgagcgtccacctcctgaaccaaggcagcagcatcgtcatccccgcccagcacatgctgccgggccagaaccagttcctactgcctggcgccccggcggtccagctcccgcagcagctctcagccctgccggccaacgtgggcgggcagatcctggcggccgctgccccccacacaggtggacagctcatcgcgaaccccatcctcacaaaccagaacctggcgggcccactgagcctgggccccgtgttggccccccactccggggcccacagcgcgcacatcctctccgccgctcccatccaggtgggccagcctgcgctcttccagatgcccgtgtcgctggcggcgggcagcctgcccacgcagagccagccagcgcccgccgggccggccgccaccactgtcctccagggggtcaccctgccccccagcgccgtggccatgctcaacacccccgacggcctggtgcagccggccacccctgccgctgccaccggggaggccgcgcctgtcctcacggtgcagcctgccccccaggcgccccccgcggtcagcacacccctgcccctgggcctccagcagccgcaggcgcagcagcccccgcaggcccccaccccacaggccgccgccccgcctcaggccaccaccccccagcccagccctggcctggcgtctagcccggagaagatcgtcctggggcagccgccctctgccacccccacggccatcctcactcaggactccctgcagatgttcctgccccaggtaagcagggcggggcaagggagcaggtaccggaggaggcgggtttgggaggaagaggggtcctggggcgaggcgccaagatccaaaagtggatgccactgtggcagctggggggggaaggtctcagtcatggcacaggtggcccctaagaggaggcccgaagggtgagggccctggctgaactggcaggaagatggattggcaggttggctgactgatagacaaggggcaggacaactgttaggcagtgagagggactggcagacagacagacaaagagagggaccagtgaacagacagaagggtaggcactggctgggctgctgacagatggagaggagagggaccggcagggagagggactacccgacggacagagaagggcaggcactggctggcctgctgacagacaaggagaggaatctcagagagaaagtggacgagacagggacagagggacaggcaggtggggcaggagagaggcagggcaacgtggagctggcagaggggccaatgggagctcagaatggagcaggctgcctgggtttcggcctctgtgcctggcaccctgcctgccaggctgcccactaccccattctctggaaccctgggagcgtcaataggggcaggggtctcgggtggggaggtcgagggcctgtgggggcggctttctgatcctgtgcgggctgcccgttgcaggagaggagccagcagcccctctccgcagagggcccccacctctccgtgcctgcctcggtcatagtcagcgccccgcctcccgcccaagacccagccccagccacccccgtcgccaaaggagctggcctcggccctcaggcccccgacagccaggcttccccggctccggccccccaggtagagggaccccagcagcctgtgtccgcagcacagacccagcctcgcccctcctgcccgctctcccgctcctcgctctccgccctgcctgcgtctctgttctgctgacttggaacacagagctctccttcaccccccaagtgtctcctagtgatcatggatgcctgagaccagggccggccctgggggagcccacgcgctgcaggaatgcaagacacacacggaaggaaatctgttctttcctaaaattataattttcaaatctgaataagtaatacattcagataattcacatttcaaacggtacaaaaagatgcatagtggaaagcccccgtctcctgaaccgtggcctcctgttgtcctcccaaggtggtttcttgcatttgttatctggatagggaaacagaatcaaatagattcttttccttcaatttttacaaaaagggtagcatcttctgcctgcggtattgcatcttttattatttaaaaattgatcttggagaccattcttcattctctctctctttttttttttttgaaatggagtctcactctatcacccaggctggagtgcagtggcgcgatcttggctcactgcaacctccgcctccgatgtttaagtgattctcctgcctccacctcccgcgtagctggagttacaggtgcccgccaccatgctgggctaatttttgtatttttaatagagacggggtttcaccatgttgcccaggctggtcttgaactccagacctcaagtgatccgcccgcctcagcctcccaaagtgctgagattacatgtgtaggccactgtgcctggccccattcttcattctcttgtgtgactgcgtagtattccactgtgtgggtgtgcggatatttatttagccagtctaaattgttgttaggtttttaggtcacttctgatctctagctattatgaacaaggctgcaaagaatgcctttgtatgtatgtcgttttgtagggtaagttcttcaaaaggaatttgctggctctaaaggcatatgcatttttatctctgacagacattgccaaattgccgcctgtggagtgtaaattagtttaacctttatcagcaatatgtggttgtgccttttttcccccgccccccgcaacctcaccagtatgttgaacttggccaatctagataggtgaaaaatagtatcttgttttgttttcatttgcatttcttttattgtgaatgaggtcgggcagattttcataaaagtaagagccatttgtactttctgttctatgaaactgctcataccctttgccattgtaaaatctgggttgctgtcattttgctgtagatttgtagaaactctttacatattaggaaaattagccttttgtcttaaagtaataaccattatgcttacgagtcataacataacaggttagggagggctacgttctttttttttttttgagatggagtctcgctctgttgcccaggctggagtgcggtgtcgcgatctctgctcactgcaagctccgcctctcgggttcacgccattctcctgcctcagcctcccgagtagctgggactacaggcgcccgccaccacgccgggctaattttttgtatttttagtagagacggggtttcaccatgttagccaggatggtctcgatctcctgacctcgttatccacccgcctcagcctcccaaagtgctgggattataggcgtgagccaccgcacctggcctaccttcttattctagagcagtgaatgtggtactcattcaaaaaagaccagtggataggtaggaagaggagagtgtgacagtgacaagggcaggatggcagaagtcagcacaggctttgacctcgaacggccatggtttcacttgcacgctctcccacttaccatttaaccttcagcaaccagtttttcattccatcagcaggtgcctaggcaggctgagggagcacttaggtggagtaaacgagttactatatgcttagcacaaagtaagcacttgataaatgtttgcttttattattattactattatcttgagggggacagagtcccactccgtcgcctaggctgcagtgcagtggcaagatctcggctcgctgcaatctccacctcctgggttcaagtgattctcctgcctcagcttctgggtagctgggattacaggtgcctgccaccatgtttggctaattttcatatttttagtagagatagtgtatcaccatgttggccaagctggtctcaaacgcctgacctcaggtgaaccacctgcctcggcctcccaaattgctgggatttacaggcgcccgccaccatgcctggctaatttctatatttttagtagagagatggggtttcgccatgttggccaggctggtctcaaactcctgacctcaggtgatccacccacctcagcctcccagagtgctgggatgacaggtgtgagacaccgcgcccggcctagcactctctcatttaaacctcaccacctccaccaggtaggtggtagcatctcattttgcaggtgaggaaacagaggcacagggagaataattagcttgcccaaggttgcacagctggcaaatggtagggcctggattaaaaaccctgggggcttattgctggaaacacctgaagtcttgagaaagccagacctgggtgtgaatccagctctgcttagtggagctctctgaggcatggattttgcatctaaaatgggaataagcccagtgacctgacatgatggcactgcacagagccagcgctcagtgaacagacacttactgttagcagttgcagtaatgatgctgtagctgaacttatttttttggaaacagggtctggttctgtcacccaggctggagtacactggtgcaatattgactcctacaacctccgcctcccatgcttaagtgatcctcccacctcagcctccgaagtagctgggactacaggcatgtgccaccacgcacagctaattttttttttttttgtattttgttttgtgggggagatatggggtctcactatgcagcccaggctggtctcgaactcctaggcttagtaatcctcccaccttggcttctcacagggctgggattatggacgtgagccactgtgcctggccacgcggatgacctttgagaaggaagcttagtgcgcacaggcaggtgtgcacacgagctgattcttagtcacacacagaggctcggaggcacaaggtagggccctccgcagtagctgtatctgcagcagtggggacccagcatgacagaaggtggtcagtgaatgtttgttgggtgagcaaatggatggacagatggatggctgaatagacggacggatggatggcatgggtgggtgtgtgactgggtgattggccaagtgtcccctggtggggacagaatcatccagactgggaaccgctatcctgtggatatgcaggaatgcacggaatagcagttcccaatctgggtgattcttactgtttgtaagaatagtggttcccttactgtccgaactccaacccctgcactcggaaggaactctgtgctctctgtacccagatggatttggcagcctctgtgtgtgtgtgtgtgtgtgtgtgtgtgtgtgtgtgtgtgtgtgtgcgcgcgcgcgcgcatgcgtacattttccctttgtgttaacacaaacagaaatgcaaagactgtgttctgcatctggctttgcttatttagcaacgcatcttggagcactggctttcagacctttttttttccttgacccaccacccgggataagaatttgtttttttttttttttctctgtcacccaggctggagtgcagtggcacgatcttggctaactgcaaccttcacctcccaggttcaagcgattctcctgcctcagcctcccgagtagctgggactacaggcgcacgccaccgcatccagctaatatttgtatttttagtagagacaggttttctccatgttggccaggctggtcttgaactccttacctcaggtgatctgtctgccttggcctcccaaagtcctgggattacaggcatgagccaccatgcccggcacaagaatttcattttatgtcaccacccaggacatgcatacatatatgtatttgtatatatacacatatcactgaaacaaaagtttcatgaaatattacctatattacaatgtgtgatacacatcaatattttctattttgtttccattgttttttctggggttagcggggaggcatggagtctccctctgctgcccaggctggagtgtagtggcactatctcggctcactgcaacctccacctcccaggttcaagcgattctcctgcctcagcttcccaagtagctgggattacaggagtgccccaccatgccaagctgatttttgtatttttagttgagacaaggtttcaccatgttgccgagggtggtctcaaactcctgacctcaggtgatctgcccaccttggcctcccaaagtgctgagattacaggcgtgagccactgcgcccagcctctactgttctttttaagtgctggttccaactccctaagatgacttgagccattaccaatggttactatgtgtaggggtgtgtttttatttttgggggtttttttgcaagctaccatctgggaagattgctgtgatgtgggagttaggaaataggacttggccacttacaggccctgtgaccttcagcaggctgcttgcctctctgttgtaccacggtgtccttgcgtgcagaatcagaatgataggaacagcggctactttgtagagctgtgagggttaaataaactaatatctgtaaattaatagatgtatattaacattaaaatgttttagaacagagttgggcatgttgaaagagctatgaagggaaagaagccaggcaaactttctttttgcttatttgatttttattcatttatttgtttatttttctgggcaactttctataaagaggcaatagtaaacgtttcaggcttttgcgggccatatggtctctgttattatagcacaaaagcagccacagaccatatgtaaatgaatgaacacgggagtgttccaataaaactttatttaaggacactgaaattggaatttcatgtaatttttgcaagtcacgaaatagtattcttatgattttttttcttcaactgtttaaaaatgtaaaaattattcttggcttgtgggctatagtttgcctctttcttttgatgtctttattgtgttttgtgatatggacataccattatttctttattcagtcccctcttgaggaatacttcaggtggtttatttgtcattgttaacaaacaaaactcctataagatattcttgactgagcgtgttggctcacacctgtagtctcagcactttgggaggccgaggcgggcaatcacctgaggtcaggagtgtgagaccagcctggccaacatggggaaaccccatctctactaaaaatacaaaaatgagccaggcgtgatggtgggcacctgtaatcccagctatgctacttgggaggctgaggcaggggaatcccttgaacctgggaggcggagattgtagtgagcctagagagggttgcagtgagctgagatcgtgccactacactctagcctaggcagcagagtgagactctgcctcaaaaaaaaaaaaaaaaacttgcacccatgctttgcacacaggtatgaaagtacttgtagggtaaatttctagaaatagaattgccagacgtagatgataagctttccagccattttgtggaaagtgctaaacctttttgaaaaggttcatgccagtgatggcttcacttggtcctgcagctttactgacacacgagattagcagctggcctgttctttgccaggctggaaagtgacacaccccctgtgcttttctctaattgtgtgtgaagttgagcatcttgccgcctccacgtggggctctcgaaatctcttggaagctgggcgtggtggctcatgcctgtagtcccagctactcaggagggaggctgaggcaggaggatcacctgagcccaggagtttgaggtcagcctgaacaacatagcgagatctcatttctgaagaaagaaagaaatggaaggaagagaaggagggaatctcttggtgaacaatccactcatatgttagtttttttgctttgggaagctaagatgggggatcacttgaggctagcagttgaagaccaaataataataataattttgtgctcatttagagaatgtagaaaatacagaaaagaacaaagaagaaaaataagtcacatgtaataccactgtgtgcaagcagttggtaaaaaaaaattttttctggccaggcacagtggctcatgcctgtaatcccaacattttgggaagccgagttgggtggatcacgaggtcaagatatcgagaccatcctggccaacatggtgaaaccccgtctctactaaaaatacaaaaattagctgggcatggtggtgtgtgcctgtaatcccagctactcaggaggctgaggcaggagaattgcttgaacccgggaggcggaggttgcagcaagcgagctgagattgagccactgcattccagcctgggtgacagagcgagactccgtctcaaaaaaaaaaaatttttttttctttgttttgttttattttttgtttttgagacagagtctctctctctctctcgcccgggctggagtgcagtggcgcgatctcggctcacggcaacctctgtctctgggattggagcaattcttctgcctcagcctcccaagtaacttggatttacaggcacatgccagcaagcccggctaatttttgtatttttagagagacgaggtttcaccatgttggccaggctggtcttggactcctgacctcaagtgatccacccgccttggcatcccaaagtgctgggattacaggtgtgagccactatgccaggcctagctttgttttttctaagacaaatattgtagaagaagtaatattttggtatgaagtttctgtttaaccccccgaccccaattttatttaaaacattttttaaataagtcattttattcacatagtatgatcatcagaaagtttttttttctttttttccagagacagggtcttgctctgttgcccaggctggtcttgaactcctgggctcaagcagtcctcctgccttggcctccgagagtgctgggattacaggcatgagccactgagcctggcctaatttatttttatttattttttctgagactgagtctctctctgtcgcccaggctggagtgcagtggcaagatcttggctcactgcaagctacgcctgctgggttcaagcagttctccctgcctcagcctccggagtagctgggattacaggtgcacaccatcccgccctgctaatttctgtatttttagtagagacagggtttcgccatgttggccaggctggtcttgaactcctgacctcaggtgatccgcctgcctggcctcccaaagtactgggattattataggcgtgagccaccacgcctggccacctggcctaatttttgtatccctttccagttcttcgtgtatatacaacctagtgcaaatatggtttacgtttctctcccatttgtacccaaaggggagctcattatgtacttactgtggcagcaacagtgagtttgcttgttttctgttagagtcttgaagtattcctttgtacagaagagccacagttcatttccccaggaaatgccatattgatgcactttagaccatatccagattttggcgttctacacgaagctgcaggaaacaacttgttcacctgttttgtttttgtttttgtttttgagacagagtttcgctctttttgcccaggctggagtgcaatggcgtgatactggctcactgcaacctccgcctcccaggttcaagcaattctcctgactcagcctccctagtagctgggattacaggtgcacgccaccatgcccagctaatttttgtatttttaatagagacggggtttcaccatgttggccaggctggtctcaaactcctgacctcaggtgatccacccgcctcagcctcccaaagtgctgggattacaggtgtgagccaccgcgcccggcctacttgttcacctgttatttcccacatatgcaggtctgtttacttcctggaagcctgtttgctggactaaagcaaatgtgcatttataacttggatagctactgctgaattgcgttcctcttgagttgtagcaaattgtgccagttgagacccctaagggcagtatatacaagcatctttactagacataggctttattcctaatgcgacgggtggtaaatggtaccctagggtgaaaaatagtgccctggggtgcgttttgctgtgcatttctcttattacaagtgaggttgagtagctctgaaaatacttaagccttttgtctttccttttctgtgcactgtctgatcatatcctttgcccctttttcaccagttgtaattcttagtgatttctagagtctctctatatatgagagagatgaactttgtatttggagttgcaactgttttccccagtaagtcatttggcatgtgacttaatttgtggattgtgtgtgtgtgtgtgtgtgtgcgcacttttgatgagaatgaaattaaatttttttaattttttggtatctttaagctttttatgtttaaatgacttcaaacacataaaaagtttcagaattagtacagagagctcataggagttctttactcctcaactagatgtattagttatctattgctatgcaggaaattaccctcaaaacttagcagcttcaaacagcaagtattcacgtgtctcacactgtttctaaacattaggaatctgaaagcagcttagctaggaggttctagctctggatctcccatgaagttgtggtcatctgaaggtcccactgatctggagaacctgctcccacgctcacttgtgtggctattagcaggaggcctcaattgcttcctcagtgggcctctccaaagggcagcacatgacacacagcggttggcttcccgcaaagtgagtgacccaatagaaacagacagaatgctcaggatgggagccgcaggctttttataactaatcttggaagtgtcatataatcacttctgccaaattctattggccacaaagaccagcatatgggaggggactgaacacaaggaggtgaggattgttggtggctgcctcccacgtctacccattgtcagccttttgctacatctgccttgaccttagcattctcattctgtgtacacttttttctgaatcagttgagagtaagttgcaaccattatacccgtttgccccttaatattttattttatttatttatgtatttatttatttttgagtctgagtctcactctgtcgcctagtctggagtgcagtggtacaatcttggctcactgtagcctctgcctcccaggttcaagcaattctcttgcctcagcctcctgagtggccgggattacaggcacacatcgcaccctgctaatttttgtgtttttagtacagatggggtttcaccatgttgactaggctggtctcaaactcctgggctcaagtgatccacctgccttggcctcccaaagtgctgggattgcaagcgtgagccaccgcggccagcctaccccttaatattttagtataatatttcagccttggagaacaaggacattctcttacttaaccatcatactgcaaagaaataaagcagacagcattgacatgatactgttgtcatatcctctgtccataatccaactttaccaggtgcccagggatcctgtaatgttgtattattctcctatttcatgtagcattggagtgccgctgcatgtgggccacctccctgagcccttggaacctactgagtgggccagttctcttttctccgactcagcgacgcacctgccattggccatttgagtcatttctccttttcctctattgtaaatgctcccaaagtgggcaaccccatagcaagtacttgaatattcttttttttttttgagacggagtttcactcttgtgcccaggctggagtgcagtggcgcgatctcatttcactacaacctccgcctcctgggttcaagcaattctccagcctcagtctcctgagtaactgggattacaggtgcatgccaccatgcccggctaattatttttgtatttttagtagagacagggtttcatcatattgatcaggctggtctcgaactcctgacctctggttatctgcccgcctcagcctcccaaagtgctgggattacaggcgtgagccaccgtgcccggccgaatattcttcatcacagattcctggaggggaatttccaggtcaaagttgtgaccctttcaaagtccccagaccaagctgccttccaggaggcagtcccaccagccgtacacagcgccaaggactgcgcctctcatctcttcttagaggtggcaaaccttttgaagactgattgattgattggtttggtttggttctttaactgtcagaagttactcagggcccagcttggaagggatgctggaagggccctgggacttagaggccaaagctggtggtgaatctgatgtcatgccgagatgcccggttctggagtgtggtggtgctggctgtcctcgggcagatatcctgagccctctgagcctgaactcagtcagctttgagaaatggctcagaagtcactgagcagtgtaaaggcctcagttccgccttcaccagcctggagagtctggaccagttttggagccttggcctcagtttcttatctgtgaaatgggtccagtgttaccactgccctcagggctagggagagatcacacaaatggatgcgggaggccggccattcgtgttagatcagcatgagctgttactaggatgcagattctgtgacagcaagtatcacggtgccagcccagtgttgggtgcacagctggtgcccactggttacacagtggctgctctggttatgattctttgggaggagggtccagaacggcaaggtgctccgtctgagacatgctttaggcgaggtggctgtgtgcgtgtgacagaactagcaccagatcgcgtgtgcttgcagacacaggcttcatcagagtctggtacgtcgtgcacacgcatgcacgcttgtacctgcaagctcacgtggcgcccaggtaggcctgcagccatggacacacaggcacacagaggcaggtgcccaggacacttagaagggggtccaggccttcccatgcccgcatccagaggtccacacgtggctgtgaacccaggcctgtccctgtgtggccatccgtattctcggcagcccccgtgccgtggccatcaaccccgagccatggtacacagcatcatgctggtgtctctttgccttgacttggctggatgggctggtgggggctggcggctgggacgctgccctgcctgccctccttccccgctgctgtgctcgccgcccggccctcctgcctcctgctgggcagcgggtgtggtgcccctgctgccaccgccaccactgcctctgcttcctctgctgctgccaccccaaccctgcagggctcgcctttgtctggggaactgcgaggggtggggggaatggggcagaagtggggttgagatcggaggccagagaaatgtggaggagctgcggtgggggacagaggtcgagggcaggtggagggggtgctgtggggaatgagaggcgagggagggaagggcagccgtggtgggctcctctctcaggatgggtgtgggctaggaagggggcttctggcggggatggctggggaccccagtgtcttggggcaacaggagctatggttggttctgacccccgcccctcccctctccctccctcccctgcccagatcccggcagcggctccgctgaagggcccaggcccctcttcgtccccgtcactacctcaccaggcccctctgggggacagcccccacctgccctccccacaccccacccggcccccttcccgcccaccctcccggccacagagtgtgtcccgccctccctcagagccacccttgcacccttgccccccaccccaggcccccccaactctgcctggcatctttgtcatccaaaaccagctaggcgttcccccgcctgccagcaacccggcccctactgccccaggcccgccgcagccgcctctccgcccccagtcccagccgcctgagggaccgctgcccccagccccccacctccctccatcctccacctcctctgctgtggcctcctcctctgagacgtcctccaggttgccagcccctacgccatccgacttccagctccagttcccacccagccaggggccccacaagtcccccactccccctccaaccctccacctggtccctgagccggcagcaccccccccaccgcctcctcggaccttccagatggtgaccacccccttcccagcgctgccccagccgaaggctcttctcgagagatttcaccaggtaacgggaggcagggactgcccgccccatcagccccatcccatcccaccctctcagtctgatgggagcccctccgccttacggctctgtgatcctccccagccctgctgcgtctggacacccctacacctagcctatgttccccacccctcatccacctgtcccctcctcaggtgccgtccggaatcatcctccagaacaaggctgggggggcccctgccgccccgcagacctccaccagcctggggcccctcaccagccccgctgcgtctgtgctggtcagtgggcaggccccatctgggacccccactgcccccagccacgcccccgccccggcacccatggccgccacaggtaggagagaggtcgcctatgtgcccagggagacggggcctgaagatgggtgggcggggctgagcagggagaatgggctggggcagggctgtgggactcagcacagggcatcagccagaactcaagggacacaggaaggccagaggtggcagggctggccccagatttgaagggccggagggccaggaggagagcggtggggtacaggatggggctcccgtttgaggagggggccttcatgcagtgaccgcaggccctgtctcccccaccccacccacccccaggcctccctcctctgcttccagccgagaacaaggcttttgccagcaacctcccgaccctgaatgtggccaaggccgcttcctccgggccagggaagccctccgggctgcaggtaaggggcccttagagcaggggtcaggacaggaccaggagtcttcgggaactgggaactggggctggcaggggcagggagacactggaagacgcggacaggatgaagctgggaccatcaggcagctgagacaccacgaacagccgtgcagggacaggaagggcagaatgacacccagacaggcagccagagatgagggagaaacacggagacggtgggacggagacggcaccaagactactggcaacagtgtaagggactatgactggggaaagagcaggtgatatggacacaggacgggaaggacagggctgagatgacaagatgtgagctcaggacaggaaaggcgggtttagatgagacagaccggagacggagcagatcagggaccgagaatgaaagggtgagagggtggggacagctgaggccgaggccacttgtagatgtaagacgtgggggagacagaagacaaggagaggagcaggtgggaggaccaggacccaagaggccgggagaagctcagagatggagatgccagaatgaaggccagacgctgaggacaagaggggaagccaggaagggaggcgggggggcgaaacgacaggagccacactgggagagagactgtgcgaggcaggggcactgggtgctgggcggtgatgtgggaagcaggcatccggcagaggagggaggtcacacagaggcagccctgggcgaggggacggagggaacccaggcagaggacacccagggctccagcctgcctgtcaccctctccgtccactccccagcccagcccaggtcttcccctggggttcattgtgatgggcaggggatcctgtagctggggccaggcccccacctgggtgagacactggtcccctgtcccgtctttatcctaggctagaggggaagctggtcgggggagggaaggcttctggaggcaaaggcctctcactcgcctttcttctcccagtatgagagcaaactgagtggcctgaagaagccccccacgcttcagcccagcaaggaagcctggtgagtccacaccccatccttgcatgcctgccctgtaccttccagagacctgggggagcatggggccaccctccagaagcagagttgggcaggcccaagtgccaagcccagctccacctcttggtagcgatgtagttccctcatagaccctcagtttccccctctggaaaatggggtgaccagagagtggtggagggagggtgggctgtggctccgccaggctggggctcaggagggcggcagtttggtccatcctggttgttgctgtgccctccatgtctcccacacggctgggccgcgtcggtgctgagccccactgggtgggtgaagtgatgggtgggggaagtgagtgggtggacatggctgttgggaggatgatggggggggtgtttggggatggatggatgggagtctgggcggatggatgggtaaatgctggatgcctgcctgccctctctcctgccctccttccaccaccagggttttttgttttgttttagggggggttctttgagccagaatcttactctgtcacctaggctagagtgcaatggcacaatattggctcactgcaacctccgcctcccccgttcatgtgattctcctgccccagcctcccaagtagctgtgaccacaggcgtctgccaccatgctcggctaatttttgtatttttagtagagatggagtttcaccatgttggcctcaagtgatccacctgcctcggcctcccaaggtgctgggattacaggtgtgagccaccacgcccagcccaccatgagtgtttttttaaaaacatataagtccggggggcagaggttgcagtgagccgagatcatgccattgcacttcagcccaggcgacagagcaagactgcatgccctcacccaaaaaaaaaaaatttttttttatatatattgtggagacaaggtcttactatgttgcccaggctggttggttttgtttttgttttgttttgtttttggagacgaagtctcattctgtcacccaggctggagtgcagtggtacaatctcggctcactgcaacctctgcctcctgggttcaagtgattctcctacctcagtctcccgagtagctgagattacaggtgcatgccaccacacctgcctaatttttgtatttttagtagagacggggtttcattatgttggccagtctggtcttgaacttctggcctcaggtgacccacccatctcagcctcccaaagtgctgggagtacaagtgtgagccaccatgcccggcctaggttggtctgaaactcctagtctcaagtgatcctcccacctcagtctcctgagtagctgggactacaggcacgtgccaccacactcggctaatttttaaataatttttgtagagacagggtcttgctgtgttgcccaggctggccttgaactcctgggctcagacaatccttctgcctcggccccgcaaagcgctgggattgcaggcgtgagcctctgcttggcctaggagtgtgaattaagtccccactcagtgcccaggcctgagccccatgttgggaacacaggagtaagtgacacaaagtccctgcccccacagtgcagagaggctgctggtttttagccgagggtggagttgggcctgcctggtgggggagacagtcacactgccaacagacaaaacccattgtaacatgggctacaaaagcggcccgtgagaagacaggatccagcctccctcccttcttcccgaaggctgcactttggaggaggcacggtggagccacactggccccaggtggcaggaggcagaatagcagcttccaggctctggcctcacttcccgctctgctcttcctcccttacgtgctttggagaggagtgacttcacttcctcgacctcaccttccctttctgtaaaatggggatagcgatagcactgctttggtcggccccagggactcagtgagatggaacaagcacgttcagtacatgggaacaccactgcccaagtattccccttcccgctgttgtgttcagttgcggcctggggctgagggttcagggacttcccctggccctcacccgtcccccccaccctccgccgtgtgtggtctctcccctttccacccgcagtttcctggagcatttgcacaaacaccagggctccgtcctgcaccccgactacaagacggccttcccctcctttgaggacgccctgcatcgcctcctgccctaccatgtctaccagggcgccctcccctcccccagtgactaccacaaaggtgaggcctccccaggacacggccctatatgtcccaggggaccccagcccgtggggcggggcgtcgccagtgtggagccgcaggtccacggtgcgctatgctgaccctgccccgccctccttcctgcgcatccgcggccgcccccaacatctccgcccttgcctctcttcccttcctcgcagtggacgaggagtttgagacggtctccacgcagctgctgaaacgcacccaggccatgctcaataaatatcggctcctgctcctggaggagtcccgggtagggtcagagtcgccttcctcgcctctgggctcctcctcgctgggacactgcccctttccctcacccgctctgggcaaggtggagcctcccgcccctcctagccccgggagggaggttgggagggaggcgggagctcccatcacaaggacagtttggaccttgcacgcatcgtccccgtcgctcgcgccccttcccccttcttgctggttcactcgcacgtcgtcttttcccccaccccagagggtgagcccctcagcggagatggtaatgatcgaccgaatgttcattcaggaggagaagaccacccttgccttggataaacagctggccaaggagaagccgggtgagaggggggagtgagaggggaggggagggagaggtgcccccaccccacctgggcagaagagttagattcagggcggggagtgggtgtgtggccctacctcactccaccactaggcggtgccccagctccaccttcctgctggcagctgtgcctcccctgacctcccgcctctcagaccagatagcccacatccatcttcctccatccctgtgtggcccttccacccccaccactctgggatggggggaatatttctgccacccccgtgggacacaaaacaggagagcaggcgcctaggttgcaaaatatataaggtaacgcccactcttgggtgccagtcctttgcttggggaccctgagagtgagcacctccttaagtgttgcaccttaggtggctcgctggcctcactctagtctcctgtctgcaggaaacggtacaggcagatcccagctgccagagtttccagaatattcccttagcctttgcccacattccaactccagggcttccctggataaaagcatggtccctgctttgtgctgccaggcgcaggctttttacgtcgagctctggaccttaattttgaaaaagtagtcattggtacttaaatgagtgcaaaggggtggccatagtgaaggaggggccaggagcgagtctgaagtctctagggtaggagaggaagggtagttccgtggttaggggctcgatgctggagtcttggtttaaatcctggctctgccacttactaactgtgtgaccttgggcaagttacttaccttctctgtgtctctgtattctcattttgtaaagtgggggttatgatgatcagcttacaatctcttatctgacaccctcggggcctgatatgttctggaatctttttgcttttagaaaggcaatgagctcactccagcctgggcgacagagcgagactccgtctcaaaaaaaaagaaaggcaatgagctacctcaatgctgtcttctgatttacccccagtgggtttggggaagcactgtgtgatcaaacacactagtatttctggagtgaaatcgatgggtatccagagtagttgagataaatcatgaccataaataacctcatgtagccgggtgtggtggctcacacctgtaatcccagcactttgggaggctgaggcgggcgatcacctgtggtcaggagtgtgagaccagactgggcaacgtggcgaaaccctgtctctactaaaaatacaataattagccaggtgtggtgtctggcacctataatcccagctacttgggaggctgaggcaggagactcgcttgaacccaggaggcggaggttgcagtgaggtgagatggcgctactgcactccagcctgggcaacagattgagactgtctcaaaaaaacaaacaaacaaacaaacaaaaaacctcatgtcatttcggaccagattttgaaattagatacctccttagccccatttttaaaaagttatgtatataattagagcagtgctgtccaatagaacttcatattttatttattgtttttttgtttgtttgtttgtagagacaggggtctcactactgtggccaggcaggtctcaaactcctgggctcaagcgatccccctcccttggcctcccaaagtgctgggattacaggcctgagccttgttttgtattctcttaatttacttatgtctgaatgagccccacgtggctcgtggcgctgtgccaggcacagtggttttagagttgggggaatttgggccttgctgaagagggtctcaccaagcctatcctgaggattggagggtccagggtgcagtctggtgcctggcaggtagtaggtgctcactgcacacagctcctcccagctcggtcggggggtcctcatcctaaccccgcgggttttctttgccccgattctgcagacgagtacgtgtcttcctcccgctcgctcggcctccccatcgcagcctcttccgagggtcatcggcttcccggccacggccccctgtcgtcttcagctcccggggcctccacccagccccctccacacctgcccaccaagcttgtgatccggcacggcggggcaggcggctccccttcggtcacctgggcccgggcgtcctcctccctgtcctcctcttcctcctcctcctctgccgcctcctccttggacgccgacgaggacggccccatgccctcccgcaaccgcccgcccatcaagacctacgaggcccggagccgcatcgggctcaagctcaagatcaagcaggaagccgggctcagcaaggtcgtgcacaacacggccctggaccccgtgcaccagcccccgccaccccccgctaccctcaaggtggccgagcccccgccacggccgccaccaccaccgccgcccacgggccagatgaacggcacggtggaccacccgccgcctgccgcccccgagcgcaagcccctgggcaccgccccgcactgcccgcgcctgccactgcgcaagacctaccgcgagaacgtggggggccctggcgcgccggaggggacgcccgcaggcagggcacggggaggcagcccggcgccgctgcccgccaaagtggacgaggccaccagcgggctcatccgcgagctggcggccgtggaggacgagctgtaccagcgtatgctgaagggccccccgccagagcccgcagccagcgccgcccaaggcaccggggaccccgactgggaggcgcccgggctgccccctgccaagcggcgcaagtccgagtcgcccgacgtggaccaggccagcttctccagcgacagcccgcaggatgacacgctcaccgagcacctgcagagcgccatcgacagcatcctgaacctgcagcaggcccccggccggacgcccgcgccctcgtacccccacgctgcctcggccggcacccccgcatccccgccgcccctgcacaggcccgaggcctacccaccctccagtcacaacggtggcctcggcgccaggacgttgaccagataacaccgggccgcctccccttccccgtcccctcctcccgaagacgccgggacagtcgggtgtccgccctcagcctcctggggactcgagccggggatcccctgacggtttttcttgcctaagttatttgagtcacaaaggcctccttccctgccgcctgcttcagctgggttgctggggggtgggcgtggatttagggagggggctgtgatgtaaaacgtctcccctgccaaaggaggggcaaagtgctgtgtcagttcctgtttcttcccatttcctggcacactctgcccctctgtccgggggacacgcgcatgtgtttgccagggatggggccaccgggttgatgccaacgctccgggtgcctgtcttgtctgtgtggcttctcagatggtggagggtgctgggagctggcagggtccttccagacagtctcagcctctccccgccgcccccaacaggctgtcaaacaaaaccggagagggggtgggggagccagcctcccagcgtgctgtgcccgcaggcacccgtgtgacatccgcacgtccagctccgtgacctgtgtgtgtgtgtgtgtgcacaagtgagtgagagatttcgaacgcccacccctcgactttgaaatctgagcaaaacaagaaactggggtcttcctctcccccgaacctctccccagctagtcttccctctgttcttcctgcctccagccgcccgcgccagattttgaaatctcggagacaaaactagtactgtaagataaatttttttgtactgtatttattgtgtataacgatttttttaaaggagaattctgtacatttagaactcttgtaaattaaaaaccgatcctttttttaaaactgtactcatgcccccttggcccattgcttttgggtttgtgagggtgggggagtgtttggatctgggattgtgaggccttcttccgcatgcatctgttgagcacctgctgagtaccaggccccgttctaggctcagggggttcaacatgaacaaggcagacaagagtccctgctaagccggtaagctgacttgttagtggggaaggcgggtggtaaacagctaagccagatcaagccagttcttcttatttccggtaaggttctataatctctgcatacactctgagaattagtgaatactgagccattgcccccagggagacagggttaggtttctaagggcctctgatcaccacagttcagtcaatacatcaccttagtttacatgtgttgctgtttaaaaacacttctttatgtatttttgagacgggctcactctgtcacccaggctggagtgcagtggcacgatcgtggctcactgcagccttgatctcccaggctcaagtgatcctcccacctcagcctcccgagtagctgggattataggcgcaccaccacgcttagctatttttttttttaatctttctgtagcaatgggatctcactatgttgcccaagctggtctggaactccacggctcgagtgatcctctggccttggcctctcaaagtgctgggaatacagacgtgagccaccacgcccagccctaaagataccttatttcatttatattgttgattcattcacattgaagtcatgccaacagcattataactggaacctggagcaagcctatttcacacatatattttatcttttctccaaaggcacatcacagcttcttggtgctttaaggtcactagaccgcacttcagctgtacgcttgggcccattttaaacaatgagtcaccaacaaaaagcacaaaaatgtgaaaagcgtgggactagataaaccaagaaaaggacgcgtgtttatggtacgagagccaaaacgagggcagaatgtcgccttattcaacctcagctgggaacgaacgtctgtgttgggcaacttgatattttgctgccgtgtgtgtgttgagagtcttgacttgggggttacaaagaagttttgatgagcagataaatgcacaaatatggcatttgcaaatagtgagggtccactgtaaatgtatacagtgtcagatgcccatataaagaagaatcaggccaggcacggtggctcacacctgtaatcccagcactttgggaggccaaatcgagtgggtcacctgaggtcaggagttcgagacctgcctggccaacatagtgaaaccccatctctacttataaaaaatatatatatatacaaaaattagctggcatggtggcacacgcctgtagtcccagcttcttcagaggctgaggcaggagaatcgcctgaacccaggagatggaggttgcagtgagacgagactgacactccagcctgggcaacagagtgagactctatcccccgaccaacaaaaaaaaagaagaaaaaaaatcatgctaggtgtattagtcccctcaagctgctataacaaaatgccccaaatagggcagcttaaaacaacagatatttattctcccacagccctagaggcctgaagtctgaaaacaaggtggcatcagggccatgcccactccagaggtgctagggaaggatccttccttgtctctgccagtttctggtggccccaggttctccttggcttgtggctgaatcagtccaatctctggctgacttcccactgtatctcttctcttctaagggcatcagtcatattggagttttgcccatcctaccagtatgcccttgtcataacttaatcatatctgcaaagatcctgattcccttttttttttcttctagctttctttttctttttctttttttgagacagatgtcttgctctgtcgcccaggctggagtgcagtggcacgatctcagctcactgcaatctctgcctccagggtttaagtgattctcctgcctcagcctcccgagtaactgggactacaagcatgtgccaccacgcccagctgattttttgtatttttagtagagacggagtttcactgtgttagccaggatggtctcaatctcctgatggcatgatccaccggcctcagcctcccaaagtgctggtattacaggcgtgaaccaccgcgcccagcccttctagctttcttcagatcacagaccctgattccaaataaaattacattcacaggcactagggttaggacatcagcctatattttgagaggacagaacaactcaatccgtaatgcagggtaaggaggtgggtgtcacaagtgagtgacaattatctgggctggtggtgtgggggtaaaagaatttaccaagacagtggtaggttaaaaaaaaaaaaaaaaaagcagatttatgggctcacgcctgtaatcccaactctttgggaggtgggcggatcacttgaggtcaggagttcaagaccagcctgactaacagtgaaaccccatctctactaaaaatacaaaaattggctaggtgcagtggctcacgcctgtaatcccagcacttcgggaggctgaggtgggtaaatgacctgaggtcaggagcttgagaccagcctggccaacttggcaaaaccctgcctctactaaaaaatacaaaaattagccaggtgtggcggcaggcacctgtaatcccagctactcaggaggctgaggcaagagaatcacttgaacccaggaggcagaggttgcagtgagttgagatcgcgtcattgcactccagcctgggtaacaagagtgaaactccatcgaaaaaaggtaataaataaataaaaatacaaaattagcagggcgtggtgatgcacacctgtagtctcagctacttgggaactgggaggatcacttcagcccaggaggcagaggttacagtgagccaagactgcaccactgcactccagcctgggcaacagagtgagactccatcaaaaaaaaaaaaaaggcagatttatgaaataaagtaggaaaatatattgcaaagttgcaatgggcaacacagccagggagaagctgactgcaaggaaacaaaggcttgctgggggttgtataggatggagttggttttttcatttgctttttagatagagtctcgctctgtcacccaggctggagtgcagtggcatgatttcagctcactgcaacctccgcatctcgggttcaagcaattctcctgcctcagcctcctgagtagctgggattacaggcacccatcaccatgcccagctaatttttgtatttttagtcgagatggggtttcaccatgttggccaggctggtctcgaactcctgacctcaagtgatccgtctgcctctgcctcccaaagtgctgggattacaggcgtgagccaccatgcccggcatataggagagttcatgttgtgtgctgaagagggctttgtgcagtactgataatgccagggttacagtgagctcacttgcaggtgtctggtgatacttgggcgcaggaagattgagttatttgtataggagggctatgtcctggacagtaaagaaaggcagacctgtaacttagctgctttatctttttgctttcctgcattctcagcagcctgactctccctaattaggactccgcaagtgggcaagacagctgtcaggccctagtatgcctttgtgtgaactagaaaagggcacccctctctcctgggcccagaatttgaagagcagagcatgagctgggctccagtcccctctcacccattcagtgagtgccttgtgcagtgaacaacctgcccaactgcacatcagggccctcgggatcaggtgggaagggaaagattctttgaggaggtgatatttgagcagagacatgcaggaaaagagggaggaagccacaggagagctctcagggaagagcatccaaggcagagggaaccgccagtgcaaaggccctgtggcaggagcctgcctggagtgtcgaggaacagcgaaaaagccaatgcggctgcagcccataagtgatggggagaggtctggaggtgaggtccgagggggaacaaagggcacctcatcgtgcgggaccgtgtcctccatggggatgatttcgctgttacactgagacgggagcttcaggagggccctgagcgaacttaggttccccagcaccctctggtggctgtttgcgggaatagacgaggggtaagggtggaaaccaagcgcagcgaggaggcaactgctgtgagtccaggtgggtggttgtggcggctggaccggggtgatgcaccctgtttctctgcaggcccctggaagtgttttgtttgtttattttttggttgtttttaggacacagggtctcggcccagcacagtggcttgctcctgtaatgccagcactttgggaggcagaggcaggtggatcacctaaggtcagaagttcgagactagcctggccaaaatgtcgaaatccggtctttacaaaaaaaaaaaaaaaattagctgggtgtggtggtgtgcgtctgtgatcccagctactggggaggctgagatgagaggattgcttgagcccaggagatggaggttgcagtgagctgagattgcaccactgcttgcacttcagcctgggcgatacagccagaccttgtcttagagagagagagaggcagacagacagacagagagagagaaggtctcactgggtcacccaggctggagtgcagtggtgcaatcacagctcactaaagcctcgaactcctgggctcaaaggatcctcctggcacagccttctgagtaggtgcataccacctcacttggctaatttttattgttttatttttattttttgtagagacaggggtctcactggcctatagcagtcctcccgcatcagcctcccaaagtggtgggattacaggcatgagccatggcaatgggccccctggggttgtatgtgggtgggaaattgatatctggggtctcagagggatggaccatcccctttcctagctctagaactactccctccacgtgtgaaataaagcactataggaaaacagctgtttcttaaaaaaaaaaaaaattttggctgggcggggtggctcatgcctgtaatcccagcactttgggaggccgaggcaggcggatcatgaggtcaggagatcgagaccatcctagctaacacagtgaaaccccgtctctactaaaaatacaaaaaaattagccgggcgtggtgactggtgcctgtagtcccagctactcaggaggctgaggcaggagaatggtgtgaacccgggaggcggagcttgcagtgagctgagatcccaccactgcactccagcctaggtgacagagtgagactccgtctcaaaaaatagataaataataaataaatagataattttttttgagatggagtctcactctgtcgcccaggctggagtgcagtggcacaatcttggctcactgcaacatccgcctcctgagttcaagccattctcctgcctcagcctcccaagtagctggaattacaggcatgcgccaccacgcctggctaatttttttgtacttttggtagagacagggtttcaccatattgcccaggctggtcttaaactcctgggctcaagcgatccaccctcctcggcctcccaaagtgctgggattacaagtgtgagccacttcgcccagcctaaatggctgtttcttaacatccttggatcacaaaactctcggagagactctcctgaaagacccctcctgattactcacaaggactcgtccacaatttccacgggctccgggactcagttctgcaaggctgactgcctgcaggcgagcggaagaacagaacagcagtgaccaacctttactaaacagggaaccgcatgggttagcatatctggtcctcacagcagccccagcgtgggaactaataggcccagcttgcaggtgaggaaactgaggccccaaagatgtagtacatggcagactgggctgtgagccaacctgcctcaatgcattcattagagagagctggctgtggggccagtgagcgatgagtgtatacaatcgctgaaaatatccacaactgggctgggtgcggtggctcatgcctgtaatcctagcactttgggaggccaaggcgggtgaattgcctgagctcaggagttcaagaccagcctgggcaacatggtgaaaccccgtctctactaaaaaatacaaaaaattagccaggcttgttggtaggcacctgtggtcccagctactggggaggctgaggcatgagaatcgctttaacctgggaggcagaggttgcagggagctgagatcgcaccactgcactccagcctgggaaagagtgtgagactctgtttccaaaaaaaaaaaagaaaaaagaaaaaaaaatccacaactgcaaaccgatgaacgcatcagtgattcctctgggtggcggggacccaggtcctgctgatgacgctgtgctttgctgctaacatttgtggttgacagaaactctgaattttagtgaaaactccagctgtctttttccccccacatctaagttcacagatcctccggaatttttttttttttttttttttttgagacggagtctcactctgtcgcccaggctggagtgcagtggtgcgatctcggctcactgcaagctccgcctgccgggttcacgccattctcctgcctcagcccccagagtagctgggactataggcgcccaccaccacgcccggctaatttttttgtatttttagtagagacagggtttcaccgtgttagccaggatggtctcaatctcctgatcttgtgatccgcccgcctcggcctcccaaagtgctgagattacgggtgtgagccaccgcgcccagccgatcctccagaatgttttgcaacaggttgagaagccctggggtagaagtgaaacaagactctcccatcagacaactctggctcaactccgagttcttccacaccttggcaggccaaactctactttctttttttttgagacagggtcttcttctttcacccaggctggaatgcagtggcgcgatcacagctcactgcagcctcggcctcctaggctccagtaatcctcccacctcagcctcccgagtagctgggaccacaggtgtgcaccaccacactcggctaatttttagattttttttatcttgcagagatggggtctcactatgttgcccaggctggtcttgaactcctagcctcaagcaatcccctgccccagcctcccaaagtgctgggattacaggcatgagccactgcacccagctctgagactttacttccttgtatttcaactttcccatctgagacatagcaataataataataataacaataataacaggacttgccctcctgggggaagggagatgatttaggtgatgcttttggaacagggcctgtctcctagcagtaacaacattaacgtaagttatcattaagctccagaccttttatatattatatatataatagtaatattatagtaacatgttattggctgggcctgctggtgcatgcctgtaatcccagctactcgagaggctgaggcacgagaatcgcttgagcccgggaggcagaggttgcagtgagccaagatcgcgccactgcactccagcctgggtgacagagcaagagtctacctccaaaaaaaatagaaaaaataaataaaatgttataattataataatataatatataatatcagttttattgagatataattcagaagccatgcaattcacccatttaaagcatacaattcagttgggcatggtggctcatgcctataatcccagcactttgggaagctgaggtgggtaaatcacttgacgtcagaagttcgagaccagccaggccaacatggtgaaaccccttgtctgctaaaaacacaaaattaggccgggcgcagtggctcatgcctataatcccagcactttgggaggccgaggcgggcagatcacgaggtcaggagatcgagaccatcttggctaacatggtgaaaccctgtctgtactaaaaatacaaaaaattagccgggaatggtggtgggcgccgtaatcccagctactcgggaggctggggcaggagaatggcgtgaacccgggaggcggagcttgcagtgagccgagatcgtgccactgcactccagcctgtgcgacagagcgagactctgactcaaaaaaacaaaacaaaacaaaattagccaagtgtggtggcatgcacctgtaatcccagctactggggagattgagggaggagaatagtttgaacccaggaggcggaggttgcagtgagctgagatcgtgccactgcactccagcctgggcgatagagtaagactgtctcaaaaacaaaaacaaaaaccaaaaccccaaaactcctgtttcttggagatatgatgagggttcgatgagctaatacatgcatgcaaagagctcagagcggtgcctgcacataggaatggctcagtcaacattagggattgtttctacaaatgtttactgagcccctgcagggagttgggcattgtgcaaagccctcacggggctcatgttctcagggcaaagacagtcccttaggcagagaaatgtggaatatgcagagtggttgggagggctgtggagaaaaatagggcagtgataagaggtagagagtgggttctaccttagccagggtgatcctggaggacttctctgaggaggtgacatttgagcagggacctgaaggaggggagagagtgaggcattcagatccctatggggaaagtactccatggagaggagtcagcaagtgcaaaggccatgaacttggagggttgggggtgtgtctgaggaatggtgaggaggccacggcggttggagccgcctgaggaagggggacaggggagatgtaggtggatcatgctaggctttgtgggccttggtgtggacttcggcttttactctgagagagaggagagccagggagggttgtcagctgagaagtttcatcaactcccttaagttttaatattaatattatatttacttatttatttgcgatggattctcactctgtcacccaggctggagtgcagtggcgtgatcttggctcactgcaacctctgcctcctgggttccagtgattctggaacttgggagcctcagcctcccaagtagctaggactacaggtgcgtgcctgcatccagctaatttttgtttatttatttatttttgagatggagtcttgctctgtccccaggctggagtgcagtggcgcaatcactgcaagctccacctcccctgtgtttaagtgattctcctgcctcagcttcccaaatagctgggactacaggcgcccgccaccacgcccagctaatttttttgtatttttagtagagatgggtttgcaccatgttggccaggctggtcttgaactcctgacctcaagtgatccacccgcctcggcctcccaaagtgctgggattacaggcgtgagccaccgcgccccgtcctattattttttttagaggtgaggtctcgctctgtcacccaggctggagtgcagtggcacaatcatagctcactgcagccttgacctcctgggttcaagctatcctcccacctcagctttccaagttgctgggatcacaggtgtgcacccctgtgcctggctaaattattttattatttattattatttttaatagacatggggtctcgctatattgtccaggctggtcttggactcctggcctcaagcaatcttcccaccctggccttccaaagtgttagggttacaggcgtgagccagggcgcccgacctgttattgttactattattgctgctgctgttgtgattcccgtgttaagaagagagacagactggggagcagcccaacgctggaggtggaggcggaattcgaaccccaggctggacgctggagctctcgcccgccgtgctaaggcgtcttccccactccccacaagggggcgccagaggccgggcgcccggttttgaggggggcgcctcgtcccgcccctccctcctgtcctccctcccgtcctccccgctccgggccccacccggctcagacggctccggacgggaccgcgagcacaggccgctccgcgggcgcttcggatcctcgcgggaccccaccctctcccagcctgcccagcccgctgcagccgccagcgcgccccgtcggtgagtgctcccagcaccgcagctgtcgcctcccgacccccgcccaagcctgccctggttcctcatgcctgacccctgctccctgccaccctgtccccagtctgtaacggtctccccaggtgtcccccagtcttcaccagtccccccagtctgtaaccatgtcccccactcttcccactcctcccactcttcctcccactcttcctccagtctttcgcagcctctcacactcccccagtctcctccatcctcccccaacacccctccctatcccctgggctagaagagatcctctctgcagggtctccctccacgccctcatccatatcagctaacttggtccctccagccactcaagagcccctctcctgcctcaccagctccatcggccaccgctgatagcattctccccagctctctctcagggccctccctgcctgggacaccgcccagagccctctccctctgcccacatcccagatcctgcctctcttttccattcttgccactcctttacgaactccttttgcttttatctcccctactccctggccaccccttttaagtctcatgattttatggattttagcatatttgatttgcagttattttgatgctcaaattgccccatgtttggccactgggcacccctgcaagctgggtcctctgtccctgtaacatgccctatcggcctttgagcacttcctcaccttctgacccaggctcacttgttcttccctgcccccgccctggaatccaccatttctctaaggagtcccaggttcttttagtggggaatggtatttagagactcccatctcaccaaaagttgattctttgaaaagatcagtaaaatcataagcatcaacggggagcaatcgtttttgtttttcttttttaaaaaaagcaaatacccacacctgtggctgatatcgggaatgaaagaggggacatcactacagatcctacggtgaataaaaggctagtaagggaagatagagaacacagtctgggtgctggaggtgctcattgctcctgggttggtcatggctaacctccctaactcagatctttagacctataataggattgcaacctctgaggtcaggctgcctgtgtttgagtcccagcttgagcattttccagctaagtgatcttgggtaatttattgctgtcttcctgagcctcctttgccttgttaaaaaagcagagatgagccggcatggtggcacacacctgtaatcccaacaatttgggaggctgaggtgggtggatcacctgagctcaggagttcgagaccacccagggcaacatggtgaaacccatctctactaaaaatacaaaaaaaaattaactgggtgtggtggtgcatgcctctagtcccaactacttgggaggctgaggcaggagaatcccttgagccccagaggtgaaggctgcagtgagctgagattgtatcactgcactccagcttgggctacagagtgagactccatctccaaataaataaataaataaataaataaataaataaataaataaaaagaaagaaaagcaaagcaaagcagggatgataatagacctactttacagggttataaatgttaagtgagttagtacagtacctggcatgcagtgatcataaatgttgcattatttttcttgttaacacccaacagccctcatgacctgggtgcacccaggcaaccttctcagctccatttctcacccctcctctttgtgcccctgtgtctggccacctacccagatgtttcatggctcccagtacaccaggacctttcacatccccagacctttgcacgcaccgtcctctctgcctaaatccccttgtcttgcctgctcttcatggagcagctcaaaagtcaaccctgccctgagtcttactggtgctgtggtctgtttctcatgccctcctctggatgtctggcatgtgtctgggtccttactgggggccctgggtgggtaggggatgatctctggctcatttctgggtccacagtgcctgaagcatggagtgagtgatttcagtgaaaaggtgtcaaatgatggaagggagaagggaggaagaaatgaatgaagcgattaaggaatccgtttcttccaggcagcttctgcatccttcgccttgtccatctcttggtcttccactaccaccatcaatcccccttcttcaaccatgtcaccattaatctttctcctccttcagctggttcgctacgatctccctattttttttgaaatggagtgtcgctctgtcaagtgcagtggcgggatctcggctcactgcaacctctgcctcctgggttcaagtgattctcctgtctcagcctcccaagtagctgggactacaggtggccaccaccaggcctggctaattttttgtatgtttagtagagacaggattgcaccatattggtcaggctggtctcaaactcctgacctcaggtggtccacctgcctcagcctcccgaagtgctgggattacaggcatgagccactgtgcctggcctttttttttttttttttttttgagatggggtcttactctgtagcccaggctggagtgcagcggcatgatcatagctcactgcagcctgcagccttgaactcctgagctcaagcaatcctcctgcctcagcctcccaaagtgctaggactacaggcatgcaccaccatgcccagctaattattttttttgtagagatgggggtctcactattttacccaggctggtcttcaactactgacctcaagcaatcctcctacctcagcctcccaaaatactaggattacaggtgtgagccatcgcgcctggcccaattccattcttcctcctgccacctgccatccatgctctgtgaccacatatttgtgaccacaaatatctgtgctcctcctcctcctccacccatcctgtcacccagacagtctacactcagacccctttcttcctccttggctgggccgcctatgctcatgccctctccccctcccacaggcagctctccatctgcacgtctctccgtgaaccccgtgagcggtgtgcagccaccatgttcagctggctgaagcggggcggggcacggggccagcagcccgaggccatccgcacggtgacctcggccctcaaggagctgtaccgcacgaagctgctgccgctggaggagcactaccgctttggggccttccactcgccggccctggaggacgcagacttcgacggcaagcccatggtgctggtggccggccagtacagcacgggcaagaccagcttcatccagtacctgctggagcaggaggtgcccggctcccgcgtggggcctgagcccaccaccgactgctttgtggccgtcatgcacggggacactgagggcaccgtgcccggcaacgccctcgtcgtggacccggacaagcccttccgcaaactcaaccctttcggaaacaccttcctcaacaggtgtgccagccgcgagcccagggcgcatctttctttttctttttgttaagacagagtttccgctcttttcgcccaggctggagtgcagtggtgcgatctcagctcatggcaacctccacctcctgggttcaagcaattctcctgcctcagccacctgagtagctgggattacagacacccaccaccacgccaagcgagtttttgtattattaggtacagttggggtttcaccatgttggcctggctggtcttgaactcctggcctcaagtgatccacctgcctcagcctcccaaagtgttgggattacacgagtgagccactgcgcccggccctgggggcacgtctttctgtcccaggggtgcatcttgctgtcccccttctctgtcccctccctgactgtgtttccctccttctcagccccaattcccttctctctacccagttcttcccatgcctgtctctgctctcttatccaggggagcacctaggctagtgaagtcagtatgcctggttcaaatcccggccagctgggtggcctcaggcaaatgacttgacctctctgcccttcttgtagcctcatctgcaaaaatgtggatcaatcaccttgggccaggcccggtggctcacacctgtaatcccagcgctttgggaggccaaggcaggtagatcacttgaggccaggagttggagaccagcctggccaacatggtgaaaccccgtctctaccaaaaacacaaaaaattagctgggtgtggtggttcgtgcctgtaatcccagctactcgggaggctgaggcagaagaattgcttaaacctgggaggcggaggttgcagtaagccgagaccgtgccactgcattccagcctgggcaacagagcgagactctgtctaaaaaaaaaaaaaaaaaaaaagggatcaggatcaccatggtctctatgccatggttgctgtgaggacttggaatagcacctggtggccgggcgcagtgtctcacgcctgtaatcccagcactttgggaggctgaggcgggcagatcacttgaggccagaagtttgagaccagcctggccaacatggtgaaaccccgtctctactaaaaatacaaaaattagctgggtgaggtggtgcccacctgtaatcccagctactcgggaggcttaggcaggagaatcacttgaactcgggaggcggaggttgcagtgagctgagatagtgccattgcactccagcctgggcgacaacagcaaaactctgtctcaaaaaaaaaaaaaaaaaaaagaacagtacctggcacaaattaagtgctcactgaacatgagctgtggctggttataactctgagatggtcctggttgccctttttctgtccggtgtctttcttcgcccataaaggatgctttgccatgcggtcccgagtccctcttcatgttttcttcgtgttttccctccttctgtccttccctgttgacccctgaccctccctctgcccccaggttcatgtgtgcccagctccctaatcaggtcctggagagcatcagcatcatcgacaccccgggtatcctgtcgggtgccaagcagagagtgagccgcggtgagtggggccagaccctggggtctgagggaggaggggctggggcctggactcctgggtctgagggaggagggactgggcccggactcctgggtctgagggaggaggggctggggtctggactcctgggtctgagggaggaggggctggggtctggactcctggatctgagggaggaggggctgggcccagactcctgggtctgagggaggaggggctgggggcctggactcctgggtctgagggaggagggactggggtctggactcctgggtctgagggaggaggagctggggcctggactcctgggtctgagggagaggggctgggcctggactcctgggtctgaggtaggagggcctggggtctggactcctgggtctagaggaggaggggcggtgtctccgctgggacttgggcctgtgtcctctggccctggctggcggggcagccgcagggagctagtggaagctgtgactgctccatgctggctcgcattgatgggtgggggaggtgtgtgggtgaccacgtggtgggagcgggcaggagccgcacgtctgggcaggcaggaaggatgggaagggagagatgaagagggacagggattccgaggcagtgagacagcgacgcagggagacacaaggcctggagatgaggcagagcctgggcaggggaggcagagcccgggcaggggaggctgggccctgcgagctcctggctctgcgtctgggccacagatggggccgagaaggggatgggaagggaatctgggtgggggccaaggccaggcctggaatttataaacagctgtgcaaggagagtggcggggggtggattccagccggggcctccgggcgtgctgagccctcaccacccctgcccagcccagctcagcatctgtggtcccccagccccacagatctgtgtcccccaccccccatggccttggaggcccagaactggggcaaaggaggctgctatgtggggcagagaggatgggaggccctggcgagaaggctgggcctggggtggggtggggacgctgggggtgaccatgtctctggctgccgtccagaggccccacgggagaaaggcaggaggcagctgcagaaacgattgggaggacacgctgccagctgagggggaggaattcctggggctcccaccccagggcctggacctgggacagcgggagggagaggctctctcagccagggcaggggtgccggcaggggggttcaaaggccatgggtggtgggggagtggggaacggggtctccctccctggccttgaggatagaggaagaggaggagagagtgtccagctgttggtgtgtatatgtgtgtgtgtgtgtgtgtgtgtgactttgtgtatatcttgggaaagtgtgtcattatgagtgtactcctgggtgtggtggttccacgcatttgtgtatagcagtggacgtgcctcattgtggccatggctctgaggttgtatgactttgaattgtgtacatgcctctgtgtgtgtgtgtgtgtgtgcgcatgtgcctataattgtggctggaagactttgttttgtttgtttttgagacagagtctcactctgtcgcccaggctggagtggagtggcgcgatctcggctcactgcaacctttgcctcccgagttcaagtggctctgctgcctcagcctcctgagtagccaggactacaggcgcccgccgcacccatgtccggctaatttttgtatttttttttagtagagacgggatttcaccatgttggccaggctggtctcgaactcctgacctcaggtgatcctcctgccttggcctcccaaagtgctgggattacaggtgtgagccaccatgcccggcctgctggatgactttgtgtgactctgaagggctgtgtagggctatgagagactttgtgggatagtgtgcaactgattctgtccctatatactgttatattgtgacgtgtgtgtgtgagagagacagacataaagggcaacttttgtctatgtgtctatgtggatttagtgtgtatcattgtaggtgtgagtctgacattgtgtgcctgtgtgtgagatggtctaggcatatatgtgtatctgggctgtgggctgtgtgtgactttgtgtggctgcatggggcggtcagggctgcggggattttgtgggactgtgtgtgactacctgtgattgtatctccggatacagttgtgtgcttctgtgtggtgttgtgtatgtgagaatgtgtgtgtgtgcaggagtgcatcttttgtgtaactgtgtgtgattacgtctgtgtgtgtgcctttggatttgggagggcatgggaggttatgtgtgtgcgactgtgtctgtgtgggtgtgcatgcatgtgtgcctctgtacctgtgtgttcgtgcaggtctctgtgtctatgccgtgtgtgcatctcacattatctttgtgattgtgtgaccacaaacatctgtgtaggtcccagattgtgaacacgggtatgtctgggagcctgcatcttgtagtaattggctatgtttgtgtctggatgtgctactgggggtgtgtgtgtgtgtgtgtgtgtgtgtgtgtgtatgcgagctcatgtgtgtggctgcctctgcatgtaagatgtgtgaacacacgcatgtgtgattgtagcatagtaaagccctcaaatctgggctctgctacttttatttatttatgttatgctacttttttttttttgagatggagtcttactctgtcttccaggctggagtgcagtggtgcgacctcggctcgctgcaacctccgcctcctgggttcaagcaattctctgcctcagcctccggagtagctgggattacaggcgcctgccaccatgcccggctaatttttttgtatttttagtagagacggggtttcgccgtcttagccaggcaggtcttgaactcctgacctcgtgatccacccacctcggcctcccaaagtgttgggattacaggcatgagccaccgcccagcctattttctgctgcttttaaactgtgggaccttaggcaagccacttaacctctctttgcctcagttttcttacctgcaaaatgggaataatgggctgggcgcagtggttcacgcctgtaatcccagcagtttgagaggccaaggtgggcagattacctgaggtcaggagttcgagaccagcctgggcaacatggtgaaaccctgtctatactaaaaatacaaaaattagctgggtgtggtggtgcttgcctgtaatcccacctactcgggaggctgaggcagaagaattgcttgaacccaggaggtggaggttgcagtgagccgagctcatgacactgcactccagcctgggcgatagagtgagacttggtctcaaaaataaacaaacagaaaaacaaaacacacacacacacacacacacacacacacacacacacacacacacactgggaataataatactagcggcctcatagttgtcctaaaggttaaattagttaaaacatacaaagcacttagaaggtgcacacttgtgtgtgcacacagtaggcgctatggaagtgccaacaatgcctgttttcgctgggtgagtgccgttgtgggcccaaggttcctttttgccacgtctcccatcccacactgactcaacctctctcccttcttccctccccgccccatgagacacactttccgaatctgggccagtatgtgtgtttgtggagacaccgggagggagggggggctccagttgctgtccctccagtgacttggcccttcctcccccaaaacaacggcccccaaccccatcccggtccctgcgttgcccgcaaggaggctgcttcctctcaggcaggatgggtgcaagcaccagctccccggaggagcataggggcccatgggactcctcttctgtcgcctcttacctgtgtgtcttgagtaagtcccctaacttctctctctttttttttttttgagacggagtttcgctcttgttgcccaggctggagtgcagtggcaggaccttggctcactgcaacctccgcctcctgggttcaagtgattctcctgcctcagcctcccgaatagctgggattacaggtgcccaccaccacacccagctaatttttttgtatttttagtggagacggggtttcactatgttggtcaggctggtctcgaactcctgacctcaggtgatccacccgcctcagcctcccaaagtgctgggattgcaggcgtgagccaccacgcctagctagtcccctaacttctctgtgcctcagtttcctcatctggaaaatggggtcagaacagtgcccacctcctggggttgttgtgaagagtcactgagtgagctctagctggagggcatgaagtcagtaaatcagggctagctccttgttctgccagttaactcttcgtcctccgggttcccactctgccttccctcctcctggaagtcctccttgacccccaggctgggggttgggtcaggcactggccctgggctcccacagctccctggatccccctgcccaccctgggctgaccactcaggggccaggtctgtgtccccagtgggctgagagatgtaaggacaaagctgaaactgcctcagcctccacacacacagcagggaccacagagggtgcttcccagtgggtgacatcaccatgacttgctgagtgcttaccgtacatccagcactgtttttaaaaaaacagtttcattgaggattaacgtacacgccataaaaactcaaccattatggccgggctcagtggctcatgcctgtaatctcagcactttgggaggctgaggtgggcggataatgaggtcaagagatggagaccatcctggccaacatggtgaaaacccatctctactaaaaatacagaaattagctgggtgtggtggcacctgtaatcccagctactcgggaggctgaggcaggagaattgcttgaactcgagaggcagaggttgcagtgacctgagatcgcgccactgcactccaacctgggcgacagcgagactccgtctgaaaaaaaaaaaaaaaaaaaagctcaaccatttttttttttaaagagacaaggtcttgctctgtctgcaggctggagtgcaatgacgcaatcatggctcactgcagcctccaactgctgggctcaagtgatcctcttgcttcctcctcctgagtagctgagactacagatgcatgccaacatgtgtggataattttttattttatttttttctgtagagacagggtcttgtcatcttgcccaggctggtctcaaactcccaggctcaagcgatcctcctgcctctacctcccaaagtgctgggattacaggtgtgagccactctgtctggccacttccatcatttttaaatgtacagttcaatgccaggcattattttaagctctttatatatattagctcatttatattcttttaatcttcacaacagtctttttttttttttgagacagagtctcactctgtcgcccagactggagtgcagtgatgctatctcggctcactgcaacctctgcctcccaggctcaagcgattctcgtgcctcagccttctgaatatgtgggaccataggcatgagccaccaacaccgggctaatttttttgtatttttagggctaggctggtcttgaactcctggcctcaattgatctgcccacttcagcctcccaaagtgctgggattacaggtttgagccatcacacctggcttcacaacagtcctatgatttgcattttacagaaaagaaaacacaagttcagagaggttaagctacttgcctaaggtcacacagtggatgggggcagaggagggactcaactccaggtcttccagacagctaagtcagggggtctcaatcgcttctctctgctctcctcagcattgcttgttggtgaataaatgagtgaagaagcaaaggtgagaatgagtggatgaaggagtgaatgaggaaatgaatggtgaaaggaatgaatgaatgagcatgggaacccatggctgggatgggtgcttcataagagcaagaatcttgtctgtgtgttctctgcggtatcccaggctcccaggacagggcttggcacacatgagactctcagtaagtattgctaaataaatgcaaaatatttaacttctcagcctggccaacatggtgaaaccccgtctctactaaaaatacagaaattagccagggtggtggtgcatgcctgtaatcccagctactcgggaggctgaggcaggagaattgcttgaacctgggaggtggaggtggaggttgcagtgagccacattcatgccactgcactccagcctgggcgacagagtgagactctgtctcaaaaaaaaaaaaaaaaaaaaaaaaaaaaaaaaaaaaaattatcatctgctatggcaagagcacagctatccagcatgaactctagttgctggatcgtggggagatacaacaggtcctggggaggagctggggtgatagaggcatgtggcaggcttgggggttccatagaagcacagggggatctcttagcaaacatgtcagtatttttaacaacctatatgtacataccgacgcacacctgtaataactgcttaatgaatgagcaaatgaaaaaatggaggccgtgaggctgggcgcggtggcccacgcctgtaatcccaacattttggaggctgaggcaggaggatcagttgagctcaggagtttgagactagcccggcagcccgggtaacatagtgagatcccatctctactcaaaaaaaaaaaaaaaaaaaaaaattagccaggtgtggtgatgcgcgcctgcagtcccagctactagggaggctgaggtgggaggatcacctgagctccgggaagcagaggttgcagggaggcgtgatcccgccattgtgctcgagcaaaggaaaagggggatgattgccccctgtagccagatggcttgaggggctggggccagagcgaggggggaaattctgggcactggagagccagagcagtagtgcccactgagggccttggctattttgcccagacaggatttggacagccaacaacgtgaacatctttacagtccaatatgcaagagaatgggatactactgagaatggctggagggtgggggtctgatttctgccccttgcgcccctgtctctccactcccactccaggctacgacttcccggccgtgctgcgctggttcgcggagcgcgtggacctcatcatcctgctctttgatgcgcacaagctggagatctcggacgagttctcagaggccatcggcgcgttgcggggccatgaggacaagatccgcgtggtgctcaacaaggccgacatggtggagacgcagcagctgatgcgcgtctacggcgcgctcatgtgggcgctgggcaaggtggtgggcacgcccgaggtgctgcgcgtctacatcggctccttctggtcccagcccctcctcgtgcccgacaaccggcgcctcttcgagctggaggagcaggacctcttccgcgacatccagggcctgccccggcacgcagccttgcgcaagctcaacgacctggtgaagagggcccggctggtgcgagtgagtagtcctgagggctgggcgcgcattcttggaggaggtttcctcggtcctctcctaccagtgctgtgagtccctgacttatcagggcccaggttagttagttctcttgaagttgggtcattctggcacagagtgaagccgggaggaagaactgtatggagagactcattcctctgcctttggatttctgtgtcaactccgtgtcaccctggcttctctgtcctggtatttctatttcttcttcctcttcctcctcctcctccttctcttcttcttcttcctctttttcttctttcttctctctttcctcctcctcctcttcttctccctcctcctcctccttcttctctttcttcctccccttcctccttccttccttccttcctctgttcctctctcccttcctccctcctcccttcctccttccttacatcctctttcgttccctcttcttccttcttttttaagagatggagtctcgctctcttgccctggctggaatgcaatgatgcaatcacagctcaccacagccttgaactcctgggctcaagtgatccttcctccttagcctgccccaagtagctgagaccacaggcacgtgtcaccacgcccagctaattttttattttttgtagagtcgaggtcttactgtgttgcccaggctggtcttgaactcctgccctcaagtgatcctccccttttggcctcccaaagtgctgggattgcaggcatgagtatgttgaatttttgaacttcctataaaatatagacagacaaatactcattattctaccctctttattttttgataatttataagattgtggttcaaaggtttccaagttcattggtttattccacaaatatttctttttcttcttcttttctttttttgagacggagttttgctcttattgcccaggctggagtgcaatggcgtgatctcggctcaccacaacctccgcctcctgaattcaagcgattctcctgcctcagcctcccgagtagctgggattacaggcattcaccaccatgcccggctaattgtgtatttttagtagagtatttttagttggtcaggctggtcttgaactctcaacctcaggtgatccgctctccttggcctcccaaagtgctgggattataggcgtgagccaccgcgccaggcccacaagtatttctggaatgctttctgtacacatggtgctggggctggggatggagggaacagacaaggttccagccctcctggggctcatctttttttaaatttaattaattaatttatttataagctagtcaaatttagcagtgggggtggggagttgcatgccaactttactgacactaataagttctgataaccaaggccaggtgcggtggctcacgcctgtaatcccaacacttttggaggattgcttgagcccaggcattgaagaccagcttgggcaacatagtgagacaccatttctattaaaaaaaaaaaaaaaagttctgataacccactaccattggaccagccccggggcttatcttttgatggagggagacagaataagtaaacagacataaaataacaatgaaggctgggtgcggtggctcacgcctgtaatcccaacactttgggaggccgaggggggagcagatcacttgaggtcaggagttcgagaccagcctggtcaagatggtgaaactgcgtctctactaaaaatacaaaaattagccaggtgtggtggcgggcacctgtaatcccagctacttgggaggctgaggcatgagaatcacttgaacccgggaggcagaggttgcagtgagctgagattgtaccactgcactccagcctaggcgacagaacgagactctgtctcaaaataaaaaaaaaaaaaaagatgaatttattacatcttaggcgcttcacagcacccgtctcccatgactcttgtttgattgtggccacagattgtccccttctctcactcctttcctctgtcctcatctcccattcccttcccagcgtcccctgcacttcacgctggtggcctcagtcctgtgcacttgctgctccctcttcctggaaacctcttctgccttcttccccctcccacctggccatccacaaggctcactccctcctcacccctttcaagactctgctcaaatgctcccttctcaggaaggctgtccatgccctcctttgaatgaatataacttcccccatatgcgtccttctttaccctaaccctgttgtcctttcctttcctttcttctcctctcctctcctttctctctttctctgtttctctttctctctttctttctctttctctttctttttctttctttctttttttttttttttgagacagggtctccctctgttgcccaggctggagtgcagtggtgcgatatcagctcactgcaacctccacctcccgggttcaagcgattctcctgcctcagcctcctgagtagctggggttacaggcgtgtgccaccacacccagctaattttttgtatttttagtggagacggggtttcaccatattggtcaggctggtctcgaactcccgacctcaggtgatccgcccgccttggcctcccaaagtgctgggattacaggcgtaagccaccacacccagccaatcagggctctttgaattccttcactgatttatccccagtgcccggaacagaattggtgctctgtaaatatttattgaatgaatgacattgaacaaacagttgcattgaacaaaatctcctctatgcctggcctggtgttgggtggtgcaggagacacaacagtgaccacgatggttccagtcctgtcctgctggggctcccagtcctaaataatgaaggcagttccagggctcagtcctcactggggctcctggagaggagacagatccatccccaggcaccgatgacccagtgtggtcagagctggggcggggtagctggggcaggcagagagggcttctttggaggagagggcatctgaggggaaatgtcagtgttgaacccagtgtagacagtgtgctaactcaattagaggctgaggatgtggctgagatcagaggtggtgtgggctgtgtccgggaatctgtgctttgtccctagggcactggggagccatgaaaaagttcggagcagggaaaggagataattagactcaagctaccttttggagggtggattcaaggcaggagagtctaggagcctggagaccaggcaaaaggcttggaggttcctggatcaggacaggccttggggagggagaggagaaaggagagcgcgggtttcagagcgattttggatgtcagatggaactttctcagggggaggctgccagggtggaggcggggcaggaagctgggcaggcagggaggccaagaaggttctagggggtggaggagcctgaggtgttggtttaaggagcagcgagagtgggtgagtcagagcccccacccccaccccaggaatcctccttcggagggagcggcccactgtggaccaggctgccactcctggaaccttcggaattcaccttgcgctcctctgcccaggcggctctgcagtgtctctctctctctttttctgtctctatgtcagtctcctttctacctctctctcagtctctttcttctccatttttactttttcttttattctaactccctttccttttctttctcgctctgcctcctcctgtctctccatctctcccccgctccgccgccgccctctctctgtcttcctcctggtcttgcttagactcccccaggttcgttcccgcgggtcccttggcgggagctggagcacaaggcccagggacagaggggtgggtccgggccagacacctggtgcccccgccgggctgggggcggctccggaaacccagacaaaccccggagtcagggacccagccccggcccagcccgccctctcaccttatctcttcctggcaccttcccctgcttcctctctggaaaagccatcagcgccctcccgcctaccctcctttggtccctacggagccgcccttcggccctgccccctggctccattggcccgctctcacaggccccgcccccagcccggccacacccctgccctgattggtccttcagaccattaggcactccctccccctcttcctgcaggttcatccatggctccccagtgccgttcaggacacaggagcatgggatttagggtccgctgtgaccaaggctcactgcccctcctttgccccgtgtcgcacccccacccctgctcctcacatatgagtccgccacacttggtcgtcaccaacaatagccatactgttaacctcccctcatgctctcctccaaagataccaggccttcctggactctctgggaggaggcattcaccctcctcccagtgcctcagtttcccatctgtacgatggagggtgtggacgaatcctctggctctaagtcctttggctgaagtgatagctgttagaaggggagattttatgatgctgtgatacgtaaggccaagatcttgggagggtctgattctatagacgccaagatgccctgaaccttcagaccacattctctgcagtggcccagtgacattcattcagcagttgccgatcgcatgtggtactcctctaggctctggggatacagcagggaacacagataaattccttttctcatagaattactttttagtggggaagcaaacattaaacaaatcaatggttatgaagaaaaatgaagcggaggaaagaggggctggcgagggactattttagagcgctctgaaggagaggaaggggtaagaggaaggggtgagccgagtggcgatcgggtggaagagcagtccatgcagtgagaacagcatgtgcaaaggccctggggcagccatgcacttgatgtgtttgaactgagagcctaacggggctggagacagggtggtggtggaaggtggaagagatgaagatttagaaccagtcagggaccaccaacgttctcagcagtctaaatttgtgattctttaaaaaaaaaaaaatatatatatatatatatatatacatatatatataatttttttttttttagatggagtctctctctatcacccaggctggagagcagtggcatgatctcggctcactgcaacctctgcctcccaggttaaagtgattcttgtgcctcagctttccgagtagctgggactccaggcaggtgccaccacacctggctaatttttgtatttttagtagagatgggttctcaccatgttggccaggctggtctcgaactcctgacctcaggtgatccgctggcctcggcctcccgaagtgttgggattacaggcatgagccactgtgcctggcctaaaagaattttttaactagtcttttttattgaacatttaagaccatctcatggaaaggcattcatactttatcagacatgattctcccacacctcaccccaccagctcccagggcctcttttctagaggcaacccccataagtagtttcttgtgtgtctttccagatatactgcattttttttttttttttttttgagacggagtctcgctctgtcgcctaggctggagtgcagtggcatgatctcggctcactgcaagctccgcctcccgggttcacgccattctcctgcctcagcctcccgagtagctgggactacaggtgcctgccaccacgcctggctaattttttgtatttttagtagaggcggggtttcactgtgttagccaggatggtctcgatctcctgacctcatgatccgcctgcctctgcctcccaaagtgctgggattacaggcgtgatatactgtaatcacgcccggccaatatactgcattttgtaaaagcatttatttattattattttgttttgagactgagtctcactctgtcgcccaggctggtgcaatggcacggtctcagctcactgcaacctccacctcccaggttcaagtgattctcctgcctcagcttcccatgtagcttggattataggtgggcaccatcagcccggctaatttttgtatttttagtagagatagcatttcaccatgttgtccaggctggtctctaactcctgacctcaggtgatcgacccgcttcagcctcccaaagtgctgggattacaggcgtgagccaccgcgcctggcctatttattcatttttttagagacaaaggctcgctgtgtcgcccagactggagtgcagtggcgacatcatagctcacttcagtctcaaacctctgggctcaagtgatcctccctcctcagccccggcaattcactgggactataggcgcgcgccagtacacccaactagttttaaaatttttttttagagaccaagtcttgctatgttgcccaggctggtctcgaacttctggcctcaagtgatcctccccccttggcttcccaaagtgctgggattataggcatgagcaatatttaatttgtgagcttcctataaaatatagacataccaatattcattattctgctctccttgtttatttttcgataatttataagattgtggaccaggtgtggtggctcacacctgtaatcccagcactttgggggaccaatgtgggcggatcatctgagatcaggagttcaagaccagcctgaccaacatggagaaatcccatctctactaaaaatataaaattagctgggcatggtggtgcatgcctgtgatcccagctactcaggaggctgaggcaggagaatcgcttgaacccaggaggcagaggttgcagtgagacaagatcgcaccactgcactccagcctgggcaacagagtgaaaccccatctcaaaaaaaaaataaaaaataaaaaataaaaagattgtgtttcaaaggttctcaagttcattggtttattccacaaatatttcctgagtgttttctgtacagattgtactggtgctggagatggagggaacagacaagtttccagcccttctggggctcctttttttttttttgagacagtgtcttgctctgtcacccaggctggagtgcagtggtatgatcatggctcactgtagccttgacctccccggcttcagtgatcctcccatctcagcctcttgagaagagaagattaataaatcaagacattaggccaggcgcggtggttcatgcctataatctcagcactttggaagactgaggcgggcggatcacaaggtcaagagatcgagaccatcctggccaacatggtggaacccagtctctactaaaaatacaaaaattatcatggtggcgggcgcctgtagtcccagctacttgggaggctgaggcaggagaatggcgtgaacccgggaggtggagcttgcagtgagccgagattgagccactgcactccagcctgggcggcagagtgagactctgtctcaaaaaataaataaataaataaataaataaagtcattatttgcaccactgcactccagtctgggtgacagagcaagactctgtctcaaaaaaaaaaaaaaaaaaaaaaaatccactgtccatttgggagaaaaaaagagtgaagaaagcaaaaagcgaataacgtcttagtattgttcttaaaataattttgaccacaggaacccccgaaaggatcttgaggacccctgggtttccctggaccacacttcgtgaattgctgctgtagggctttgtcggcttcggtagaaattttgaacttcaataagcaaatagagagttatgagcagcatcccctgggctcatgttccttcctgaaaaatgccctcttgggccactgctgcatggagcaagggttattggggcaggatggggagctgggagacctgtcgggccaccttgggtgtctccccaggcaagagaggatgacgctcgaatggacatggtggccactgaggtggagagaaatgagaagcaggggagaggctgggcgtagtagcgggtgcctgtagtcccagctactcaggaggctgaggtgggaggatggattgagctgggaaggtggaggttgcactgagccgagattgtgccactgcactccagcctgggggacagagccagaccctgtctaaaaaaagcaaaaaagaaaaggaaagtaggggagagagggagagacataggaggaggcaaaagggactcattgataggttggatgtggctacttaacaggaggaagaatcaaatatcaaatcaataatgatttcaagagctgggtaccgtggctcccgcctgtaatccagcactttgggaggctgaggcaggcagatcatttgaggtcaggagtttgagaccagcctggccaacatggtgaaaacccctctctactaaaaatacaaaaattagtggtggcgggcacctgtaatcccagctactcgagaggtagaggcaggaggattgcttgaacccaggaagtggaggttgcagtgagccaagatcatgccattgcactccaccctgggcaacagagtgagactccctttcaaaaagaaaaaaaaagtgatttctagagccggacggggtggctcccgcctgtcatcccagcactttgggaggccgaggcgggtggatctcttgaggtcaggggttcgagaccagtctggccaacatggtgaaagccagtctctactaaacatacaaaaattgaccaggcatggtggcacgtgcctgtaatcccagctactcgggaggccagggcaggaggattgcttgaacccggaggtggaggttgcagtgagacaaggttgcgccactgtcctccagcctgggtgacagagtgagtgagactccgtctcaaaataaataaataaataaaaataaaatttctagatttctggcctcaactgggaaggcagggctggggatgcccttttcagagatgggcacagctgagggcgacacagctctgagggctaggctcaaattccacttagggcatcctggtatggagctatccaggaatgttgacagggcaattagctctgagtcctgagctggagggagaggcttaggctggtatgcagattcgggagtggacctcttggaggggtgtttaaaactgggagggactcagctcacttagttagcagagaggaggagcccagggtgagccccagcaggaggaggccatgaggctcacagtgtggcacctccgcctgcagcacctgtaacttgtcagaaatgcaaattcccatctgggcagtggctcttgcctgtaatcccagctacttgagaggctgaggcgggaggatcccttgagcccaggaatttgaggctgcagtaagttatgatcgcaccactgcactcctggctgggtgatagagcgagaccctgtctccaaaaaaaaaagaaaaaaaagcaggccaggcgcggtggctcatgcctgtaatcccagcactttgggaggccacggcgggtggatcacctgagattaggagttcaagaccagcctggccaacatggagaaaccccgtttctattaaaaatacaaaaaaattagccgggtgtggtggcgcatgcctgttaatcccaactacttgggaggctgaggcagaagaattgcttgaacccaggagttggaggttgcagcgagctgattgcaccactgcactccagcctgggcaacagagcgagactctgtctcgaaaaaaaaaaagactgggcacggtggctcacacctgtaatcccagcactttgggaggccaaggtgggcagatcacgaggtcaggagtttgagaccagcctgaccagcatggtgaaaccccatctttactaaaaatacaaaaattagctgggcatagtggcgcatgcctgtaatcccagctactcaggagcctgagacaggagaattgcttgaagccgggaggcggaggttgcagtgagccgagattgtgctactgcactccagcctcggtgacagagcgagactccgtctcaaagaaaaaaaaagagagagagagagagaaaaagaaataaaagaaatacaaattctcatgccccagcccagaccaagtaaatcagaatctctgggagtggggcctgcagcctgtgttttaacaagctccctggtggaccctgatgcaggctgaggtgagaacccttcccacaggttcacgcttacatcatcagctacctgaagaaggagatgccctctgtgtttgggaaggagaacaagaagaagcagctgatcctcaaactgcccgtcatctttgcgaagattcagctggaacatcacatctcccctggggactttcctgattgccagaaaatgcaggtgggaagctgcccaggagggaatgttgggggtgggtgatgggaaggttggtttctggaagctctgagatgggacctcaaaagccagagggatggatggcaggttctggaaagcgcctccctcaaatagttccgtgggagcatggttttatgagtcaggctaggggagtgaagagaaaacccaaaataacagtggctaaattaagatagagagtttttctttctttcctccataaaaagtcccagaaagtgatccaggactggtttggtgctttacagagccagggatctagtccccttctgtcttatttctcttccatgcctggcctccaggcccaaggaacttcatggtacaaaagggctgtgaaggctccagccattgtgtctgcgttccagccagcaagaagttgggaagggggccaggcatggtggctcacgcctgtaatcccagcactttgggaggccgaggcgggcggatcacgaggtcagcagatcaagaccatcctggctaacacggtgaaaccccgtctctactaaaaatacaaaaaattagctgggtgtggtggtgggcgcctgtagtcccagctactcgggaggctgaggcaggagaatggtgtgaacccgggaggcggagcttgcactgagccaagatagcgccactttactccggcctaggcaaaaagagcgagactccgtctcaaaaaaaaaaaaaaaaagaaaaggaagttgggaaggggaagaaaagagtagtctctttaagaacactgtttattttattttcatttatttatttgagacttaaatatttatatttgtaaaatataaatatttaaaatatacacagctgggtgcagtggctcatgcctgtaatcccagcactgtgggaggccaaggcgggtggatcacctgaggtcaggagttcgagaccagcctggccaacatggtgaaaccccgtctgtactaaaaatacaaaaattagctgggcatggtgttgcgtgcctgtagtcccagctactggggaggccgaggcaggagaatcccttgaacccgggaggcagaggttgcagtgagctgagatcacaccactgcaatccagcctgtgtgaccgagtaagattctgtctcaataaataaataaataaaataaaatatatacgtttaaaaatttatttatatattttttagagatttatttatatatttttcagagactctgttgtccaggctggagtgcaatggggtgatcatagctcactgtgtacttgaactcctgggctcaaaggtccttctgcctagcctctagagtagctgggactacaggcacatgccaccatgcctggctagcttttttttttttttttttttttgagacagagtctcactctgtcacccagaccgaactgcagaggcgtgatcttggctcactgcaacctctgcctcctgggttcaagcagttatctcacctcagcctcccaagtagctgggcctgcaggcatgtgccaccacgtacagataatttttcatacttttagtagagatggggttttgtcatgttggccaggctggtctcgaactcctggcctcaagtgatcctcctgccttggcctcccaaagtgctgggattataggcaggagccaccatgcctgaccaagaacactttctagaacagagctgtccagcagtacgttctacaatgatggaaatgtttcattctgcactgtccagtatggtagccactagccacattcaaatggaatgttaacgtgtatttcttttttctttttttttgagatggagtcttgctctgttgcccaggttggaatgcagtggcaagatcttgactcactacaacctctgcctcccgggttcaagcaattatcctgcctcagcctcccaagtagctgagattacaggcatccgccaccacgcccagctaattttgtatttttggtagagatggggtttcaccatgttgtccaggctggtctcaaactcctgacttcaggtgatcctcctgccttagcctcccaaagtgctgggattgcaggcatgagccactgcgcccggcctgtatttcattttaattaatgtaaataagcacatgtggctagtggctgccatactggacaggctaacagtagaagctgcacatgcaacctgtgcttgcctcagtggacttgaacttagtcatactctggctgccagggaatccaggttgcaacctaggatccccaacccttcagagtcgtgatcagctggcctctctgccttggctcaggaaattcacatagggctgtgaaaggaatccattttcgcagagactgtcctggtgcagtctgggccacttagagtagcccgtgtgagaagcagtgtgacgccaagtccacccctacaccccaaagtgacttcttcggtggggagggggtggtcccaggaacccctgatgatctgatcatctcaaatctcacctccaaatttggcagccagccactcagtcctttctgtgtggtgtggtagcactgtgacaggaattaagctttcttaactttcttttttctctccccccctgcacacttttttgttttgagacagggtcttgctctgtcacccaggctggagtacagtgtggtgctatcttcgctcactgcaacctctgtctcctggggttcaagagattctgtctcagcctcccaaagtagttgggactgcaggcgtgcaccaccacacctggctaatttttaatttttttttttttttttttttttttttaagaaatagggttttgaggccaggtgcagtggctcatgcctgtaatcccagcactttgggaggccgaggtgggcagattgcctgaggtcaggagttcgagaccagcctggccaacatggcgaaaccccatctctactaaaaatatgaaaatcagctgggcatggtggtaggcgcctgtaatcccagctacttgggagtctgagccaggagaatcgcttgaacccatgagacggaggttgcggtgagctgagatcgcgccattgcactccagcctgggtgacagagcgaaactcgtcaaaaaaaaaaaaaaaaaaaggaaagaaaagaaaagaaatagggttttgccatgttgtccaggctggtcttgcactcctgggctcaagtgattctcccacctcagcctcccaaagtgctgggattacaagtgtgagccacccaagcctgctgagtttttttttttttaacttttaatgttgtacgtgctggctgggcagctggagttgggtagagggcggttagggttctaggctggtgtggatgctctgagaaagctatacttgatgcgaaaatattgaaatccttctctgctagctggcaaagggccgctgctctcactcatcagaggggccccagcctccccaccctccagtaattctggggcacaggagaaagcctctgggaccttgttgcccaagtatcttctcattggtgggtgcccgagcggaacaggttgttcagatgttcaaatacttctgcatgtgtcagtaaagagctgccactctggctgggtacagtggctcacacctgcaatcccagcactttaggaggttgcggtgggaggatggcttgagctcaggagttcgagaccagcctgggcaacatagcaagacttggtctctacaaaaaatttttaaaactagttgggcgtagtggcgcacacctatagtcccagcgaattgcgggggctgaggagggaggatcacaaaaatttagctgggtgggtggtgtgtgcctgtggtcccagctacttgggagactgaggccagaggatcgtttgaggctgggagttggaagctgcagtgagctatgttggcaccactgcactctagcctaagtgacagagcgagaccctgtcaaaaaaaaacaaaacaaaacaaaacaaaaatggctgggcgcggtggctcatgcctgtaatcccagcattgggaggctgaggcgggcgaatcatgaggtcaggagttcgagaccagcctggccaacatggtgaaacgctgtctctattaaaattacaaaaattagctgggcatggtggcgcatgcctgtaatcccagctacttgggaggctgaggcaggagaatcgcttgaaaccggaaggcggacgttgcagtgagccgagattgtgccatttgcactccagcctgggcaacaagagcaagactctgtctcaaaacaaacaacagtaaaaaaaccccacaacagctacccccgagcttctccagtgtcctgataccaccttgcagcctgagggcctcagggatggcgccgcttgaattctgggtgcccctgtcccccaccacaggagctgctgatggcgcacgacttcaccaagtttcactcgctgaagccgaagctgctagaggcactggacgagatgctgacgcacgacatcgccaagctcatgcccctgctgcggcaggaggagctggagagcaccgaggtgggcgtgcaggggggcgcttttgagggcacccacatgggcccgtttgtggagcggggacctgacgaggccatggaggacggcgaggagggctcggacgacgaggccgagtgggtggtgaccaaggacaagtccaaatacgacgagatcttctacaacctggcgcctgccgacggcaagctgagcggctccaaggccaagacctggatggtggggaccaagctccccaactcagtgctggggcgcatctggaagctcagcgatgtggaccgcgacggcatgctggatgatgaggagttcgcgctggccagccacctcatcgaggccaagctggaaggccacgggctgcccgccaacctgccccgtcgcctggtgccaccctccaagcgacgccacaagggctccgccgagtgagccggcccccctcccatggccctgctgtggctccccagctccagtcggctgcacgcacacccctgctccggctcacacacgccctgcctgccctccctgcccagctgtaaggaccgggggtctccctcctcactaccgccagacaccccggtggaagcatttagaggggaccacgggagggacaaggcttctctgtccgcccttcacacctccagcctcacgttcacttaggcacatcacacacacactggcacacgcaggcatccatccatccgtcattcattcaaatatttattgagcacctactatgtgcccagccctgttctaggcactgggcattaccatagagaacaaaatagacaaatacatctgccctcatggaaggtgacgttcccaggagagggcacctacacagtcacgcaaacacacactaattcctggcagggcccccagcccctcccctggctgagcagccctgtggctgaaatgactagcagataaacagacccccttctgctccgcttcctcctgcccagccaggcaacaccctcaaccggctccatcacatcctcaggtctcgggaccatggggggctcagaggggagacacacctactgcttcctcagatgggcccctccgcagccccttcccttgctcggggaaagcccccaattctgcccacacccatttatttccttccttccttccttcttttctttccttccttccttcttttttgtttttgcccccaattctgcccatacccatttctttctttccttccttccttcttttttgtttttgcccccagttctgtccacaccccttccctttcctgtcctgtcctttctttcttttttgatagaatcttgctctgtcgcccaggctggagtgcagtggtgagatctcagctcactgcaacctccacctcctgggttgaagtgattctcgtgcctcagcctcctgagtagctgggactgcaggcacgcgccaccacgcccagctaatttttgtatttgagtagagacggggtttcaccatgttggccaggctggtctcgaactccgcatctcaggtgatctgctcgccttggcctcccaaagtgatgggattacaggcatgagccaccgtgcccggcttcacacccatttctttaaaaaggatcccgtagcaggcagaaaagccccttccatcctgctcctctgatactgtgcccccttggagatatttccgtcctccacccacgtgtctgtggctggaactgcccagcctgctcctggccccctggaagcctccccacagctggtaatctggacttaaggattgctgggccaccgcctctctgcctaccaccattccatatttaagtggagcccctacgtagaaaggccccggggctttattttagtctccttttcagggatgtcgtgggcgggggagggggttcttggtgctacagccctctccccacccctaaagggacgccgacgctgtttgctgccttcaccacatattagtgcttgaccctggcaggggaccccatggaaaagatggggaagagcaaaatacatggagacgacgcaccctccaggatgctcgctgggattcccacgcccaccactgtcccccaccccatggctgggaggggcctctgaacggaacagtgtccccacagagcgaataaagccaaggcttcttcccatgtggcagtgaggctggcttgggacagggatcgcccgccctcccccagggaaagagagacctgggcaggatttggggtggggggaggcccccttccgtgctctcaggggcggggtggagtccgtgactcaatgcagcgaggcctggtgactcaggcctgggctgggggccagaacggcatattttccgaggaaaagtgactctggggccctccccccgggacatcccttcctcccacctcccgcggcgggggcctgggaaccaagccctggggcgcgcgcggggtgtgtgtgtgtgtgtgtgtgtgtgtgtgtgtgtgtgtgtattcgggcacgaagtgctctcccagctcccgccctgcccggcaacgtgcccttgcacaacctgggtacataactcccgacgcgtaacaccaggaacacgctggtttctggttggggaagtggtgaccttgcccacacgggctgccaggagtgtgcgcgcgctcacgcaccggggactcttggccagagctgggcagcgcaccgtgcgcgccgagtcccgcgcactcacatccaggccacacccacggcgtcccgggacacgctggccgcgcactcatcccgcccacgcgggcccagtttcgcggctcgcggcgccccctggcggacgctcagaaaacagataggctgtggtcgccaaaatccctgcccaggtgattcggcgctcaggtctcggggctgcgatccagggcctgtcacctttagggcctgtcacctttccaacgctctgcgcaaggatccagttgaatttcgctgtgtgaccatgcgtgtgtcgcctgccctctctgtgcctttttcctttatgagtccagagtggcttttatgaggcctggattcctttgatttgattgttttgtttttgagacagggtcttgctctgtcacccaggctggagtgcaatggtgcaatcacggctcactgcaccctccaactcctgggctcaagcgatcctcccacctcagcctcccgagtacctgggactacaggcgcacaccatcacgcctggctaatttttaaatttttggcagacacaggatctcactatgttgcccaggctggtcttgaattcctgggctcaagcgatcctcctgcatcggcctcccaaagtgctgggattagaggcgtgaatcaccacgccctgccatggatccctttgaatggctgccagggcccaagagcctctgagcttccttccttatttgtaaatgacaaagatgagttgattctaagatgaagcctcagagggcaaggcagtaacaatagctaacactcagatgccagacgcagccttaagcgctttacatatgtttaatcttctgcatgacttatgacgcagatgtactgttatcatctttattttacagatgaggaaactgaggcacagtgaagtagcccgctcaagatgaatgattctgagtctgcacttctagggtcctaaaagtgtatgtttctaacattcctctaatgttctgtgcttccaactttgatattccgaaagttacttgatttctaagatcctaggattggaacatttgagaggacaaaacttctgagattggaatgtgtgttgtgcggaatctgccactgacggttctgactttctaagaaaacgagattaaaaaataatcaggccgagcatggtggctcacatctgtaatcctagcattttcggaggctgaggagggagaatcacttgagcccaggggttcaagaccagcctggacaacatagtgagacctttgtctcttaaaaaaaaacacacacacatcagtttggaccgggagtggtggtgtgagcctgtaatcccagcgctttgggaggcctaggaaggaggatcacttgaaaccagatgtttgagaccagcctgggcaacatggggaggctccatttctacaaaaaataaaaataaaaaattagccaggtgcggatgcacccttctgtggtcgcagctactcgggaggctgaggtaggagaatccctgagcttaggagttggaggctgcagtgagccattacccttccactgcactccagcctgggggcaacaaagtgagaccttatctattaaagaaaaaaatcagtttgagcaaagaccccaggcggccgggaaaggtgttcgcttaagggcgaaagctaagaacctgcaaccttcccgtctctttcctaccacccgccgccgttaggaatcttcagatcccgctgtaaagaatggaggaaggaggagccatttatcctttaccaagatggcagcctcctggcaactccagtcactttataaatatggctgccacaggaagtacgtcacggaagagggtgggaaatctgcgcgcgcacgctgcaaaggggctttttgggacgccagtggctgagttcttcctttgacaagatggcggcaggaggcagtggcgttggtgggaagcgcagctcgaaaagcgatgccgattctggtttcctggggctgcggcccacttcggtggacccagcgctgaggcggcggcggcgaggcccaagaaataagaagcggggctggcggcggcttgctcaggagccgctggggctggaggttgaccagttcctggaagacgtgcggctacaggagcgcacgagcgggtacgttgggcgggacttccgggaggtgggacggttcctgcgcccaggtgcaaggccaggcgtgcttgcgtggactcgtcgggggtcgggggtcgggggtcgggggttgggggctcctgtcccggggaccgccgaggaaatggagagcatgggcaggggactcagcatgggaagctggagagcttgatagagttaccagatttagcagataaatatacaggacgctcaattaaatttggattttaggtaaacaatgaataatttttagcataaatacgttccatgcatccaccttagcttgctgttttctaaatatgtgtgtgtgtgtatgtatatatgtgtgtgtatatatatgtgtatatgtgtgtatatatatatgtgtatatgtgtgtgtgtatatatatgtatatatatatgtttttcagacggagtctcgctctatcgcccaggctggagtaggcgcgatctcagctcaccgcaacctccgcctcccaggctcaagcgattctcctgcctcagctccttagtagctgggattacaggcgggcgccaccacgctcggctatttttcttttcttttcttttttcttttttttttgagacggagtctttctctgtagtccaggctggagtgcaatggcacgatctcggctcactgcaacctctgcctcctgggttcaagtgattctcctgcttcagcctcccaagtagctgggattacaggcatgcaccaccacgtccggctaatttttgtatttttagtagagacagggttttgccatgttacaggccaggctggtcttgaactcctgaccttaggtgatccacccgccccggccccctaaggtgctaagattacaggtgtgagccaccacacccagcctaatttttgtatttttagtaaaggcagggtttcaccatgttggccaggctgctcttgaactcctgacctcaggtgagccacccgcctgggcctcccaaagtgctgggattacaggcgtgagccactgcgcctggcagtccttcctaaatactaagttctgtaaactgctgggcgaagccttagcctggaagagtccggtggcgggacttgactaagcggaagatgaaggctggacctgccaggttaaatctctttcctctccaacatctctggctgatgttctgcatttctgtcccccagtggcttgttgtcagaggccccaaatgaaaaactcttcttcgtggacactggctccaaggaaaaaggtgaggagaggcttttgtggtgtggaatggcggttattcattgttagtcagcttacggtagcctctgagatctgtgttaatgatgtggcttggaaggcaaatatctgcggaaacaggtcaaccttaatataaacaaggggacctcaaatgggcagaaagcaagctggagacgaacttagagaaggcaggtttttcttttgagatgtcagtgatctccatgcacagataagctgctgggagtctgccttgatgaataagttagaaacacattaaaggatctctttttagcttgcagaaaagcaagtcaaggacctgcttaactcagtcctgccggttgcggtgagtcacgcctgtattcccagtactttgggaggctcaggcaggcagatcacctgaggtcaggagttcgagaccagcctggccaagatggtgaaaccccgtctctgctaaaaatacaaaaattagccagttgtggtggcgggcacctgtaatcccagctacttgggaggctgaggcaggagaatcacttgaacctgggaggtggaggttgcagtgagccgagatcgcgccgctgaactccagcctgggattactattatttttttgagacagtgttgcgctgtcatccaggctggagtacagtggtgtgatctcagttcaagcgattctcctgcctcagcctcccaagtagctgggactgcaggctgcaccatcaagcctggctaatttcttttcttttctctctctctttttttttttttttttttttttttgagatggagtttcaagcccaggctggagtgcaatggcgtgatctcagctcaccgcaacctccacctcccaggttcaagcgattctcctgcctcagcctcctgagtagctggggttacaggcatgtgccaccatgcccggctaattttgtatttttagtagagatggggtttctctatgttggtcaggctggtctcgaactcctgacctcaggtgatccgcccgcctcggcctcccaaagtgctgggattacaggcatgagccaccacgcctggtcaagcctggctaatttctgtatttttagtagagatgggtcttcatcatgtcagctaggctggtctcaaactcctgacctcaggtgatccacccgccttggcctcccaaagtgctggggttataggcgtgagccgctgcgcctggccaagatgagctttaataggaataagaggacttgctttagtgagcgggtaacacacgtcttaacttgcttgccttaagttgctagaatgtagggtggggatctgctgaaacaagatgaggcgtgagggagggattgctctggtgagtaatagtgtttacttcaatatgtagaaaaacaaactaagaacagatgatctgctctaatgaacagcctggaagcaagcgaaggggtctgctttaatgagcaagagagtgagcttgtgtgagatcagtcaaagggtatgttttaatgaaaatgagcggacctggttcagtgaccagatagagtggaaggagctgccctgaggtacaggagacttccaataggcaggtaaaaagtggttattagagtctgggtgcagtggcctacacctgtaagcccagcgctttgggaggccgaggtggggcggatcacttgaggtcaggggttggagaccagcctgggcagcatggcgaaaccccgtctctactaaaaatacaaaaactagccggacgtcatggtacacgcatgtaatcccagctactgagaagcgcttgaacccgggaggcagaggttgcagtgagccaagatcataccactgcactccagcctgggcgacagagcaagactctgtctcaagctgggcgtggtggctcacgcctgtaatcccagcactttgggaggctgatgcgggtggatcacctgaggtcgggagtttgagaccagcctgaccaacatggagaaaccccgtctttactaagagtacaaaattagccgagcgtggtggcgcatgcctgtaattccagctactcaggaggctgaggcaggattgttgcttgaacctgggaggcagaggttgcagtgagccaagagcgcatcattgcactccgctccagcctgggttacaagactctgtctcaaaaaaaaaaaaaagtggggggttattagagaagtcagccttgaccgaagtgagttgatctggtgtgtgagtgtaaagggtaagtcagtgacctgcccgtaatgaacagatgggaaagtagttaccggcgtgctttggcgagtgggaagcctctttggggggcaggaaagaggcagtttatgggttccactttagtaaggaaacacggacaaagatcatagtggttgtgagcagtcaaccaggtcagcccctgtgctttgtgggccttaaatgattacatcttcataacggcctagtgagggaggtatccacatcctcattttgggggcacggaggagctaagcctcttgtgtgaggtcccacagtccatgcaagggtgttattccattctagagtgttttgctgtagagttactgcttttaactgttaggcttttgaagtaaaaaccacaggtatctttgtgggaggaaaaagacagtaaaaaccagagaactagaagttatgctgagaagtggccatcctgggtcccaagtccacttctgtggccctccctgggcttcagtgtcaactgatgacttgctttcttccttttttttttccccctgagatgagatctcactatgttgctcaggctggcatcaaactcctgggctcaagcgatcctcccacctcagcctcccagagtgctgggattacaggcgtgagccaccatgcagggaagaggttccctgtttgtctggaagaccctcctatgtggctgtgggcgtgactcttcgtgtccccagcatggggcctgcctcctgctggcccagcacttggttgtggagggtcagagcttgggcaccttgggccccatccttaggggcctctacctccaggtaggagcctggggacctccaagtctcctggggtgacttgggattcaggtctgatggctcccatggaggtgaatagggtgggtggtctttggcagtgggtagggctgaggccttgacttgttctctttcccattcttagggctgacaaagaagagaaccaaagtccagaagaagtcactgcttctcaagaaaccccttcgggttgacctcatcctcgagaacacatccaaagtccctgcccccaaagagtgagtgtcccagcatccctgggcccttctttcccaccagactctggtcctaaagggtttccggggctgggggctggtaggtgagggtcatttgaagggtagggcaggctcaggtttgggcttcggagtgcagattagagggagggagtctgggtgccctggtgctgggccgaggcaggtgaggaggggcctggacccagctgggggcttcggggttggagaggaggggctgagtgggaggcgtgttcaggaggcacatcaggtgggtcttggggcatgagcgggtgagagggtggacagctggccttcccctgagatggggatgtggaggagtgggatttcgggtgatgctgaggttggttttgacgtggtggtgtgaggtgcctggggtatgtccaggacggggctgttgcttcgttgagtctggggctcagaggggaggcctaggctggagacagacgtggggagaggagttctctgaagagggggcggagtgccaccttttggagagggggtgctgaagctgccttaatggtggaggaagcccgacggggaggaggccctgctgccgttcaggctgccacctcacctgctgcacttgtgccccctctccccgaccagcgtcctcgcccaccaggtccccaacgccaagaagctcaggcggaaggagcagctatgggagaagctggccaagcagggcgagctgccccgggaggtgcgcagggcccaggcccggctcctcaacccttctgcaacaagggccaagcccgggccccaggacaccgtagagcggcccttctacgacctctgggcctcagacagtgagtgatcctgctgtcacctatgaatggggacaggacggccatgtgcagtttgtgtgtgttgtgcactgcacgagagtacagtgtgaaagggagtgctttgtgggtgctttggtgacctcccagcagagtcgtgcgtcctgaaggggcggccgtttcccactcgtgcttttcctttcctgagttgtgaggcttcaggaaaggaagccttcagctttggtctcttccactttctgaacccgtccagacacagttttgtcctggtgatcaaggcccttggggtctagaatcagtccttcccttgcctgagcttcagggtcacctttttgaaatgtggagggattgggggggagcctttggtgcctcttccatgctgggactgtcccagcagctcccctcgctgtatccacagaccccctggacaggccgttggttggccaggatgagtttttcctggagcagaccaagaagaaaggagtgaaggtgagatgtgtgggaagggcatcctgggtgatgggagggtgaggagggccgggagctgctctgtgttcctgcagtagagtctgtctcagagcccttccatcccagtggccgagaactctgtgctggagccaggtggctgggattcctgtcccagctccagtgctgactgatcctgggaaggtggtctcacctttctgcaacctatatcttcctctaaaatgcagatgagggccgggcatggtggctcacgcctgtaatcccagcacttcgggaggccgagacaggtggatcacctgaggtcgggagtttgagaccagcctgaccaacgtggtgaaaccctgtctctactaaaaatacaaaaaaaaaattagctgggcttggtggcacgtgcctgtagtcccagctattagggaggctgaggcaggagaatcgcttggaccagggaggtggaggtggcagtgagccgagatcatgccactgcactccagcctgggcaacaagagcgaaactctgtctcaaaaaaaaaaataaaataaaatacagatgaaattgtacttagatcatgggtcggtggggagaatgtaaagaggtagcacatgagaaggtggagcccgtgctggcaagtggcagaagtgtcacgggtttgagtttggatttgcagcctccttcttgagctgctggaccccaagtgttagagcccaggtgcttacaatctccggggctcagcctcgtgggtagcagaggataggctgctatcctttttctgagatggagtcttgctctggagtcacctgaatgccccttgagctcttcccacacccaaccactggcaaggcctggagcatctgccccatggctgtgtcctgggtcacccgcagccccaacgcacggccttaccctgcctcggccttttctccacagcggccagcacgcctgcacaccaagccgtcccaggcacccgccgtggaggtggcgcctgccggagcttcctacaatccatcctttgaagaccaccaggtacactgccccgtccaggcctccctcctcagtgggctctgcctcttggtcaggccttcactagcttcctccctgtgctgggaactccaatgacccagacagccctgggcctgtccgcaacggggctcacggtccagtgcaagagacctgttcccagacagtgatgggcagagtggttggggctgggagcccagacggggcacctggcccagcctggggggtcaggaagggctcccgggaggaggggtcgcctgagccgaggcagaggctgagggaggggtttgcagtgggaggaggggagtgggttttccaggtggtgggaacagcactgcaaaggcacagagttgagagagaccgtggcgccttccaggaagcctgtggggcagagatgaaaaaggctgtggtgacacggtggcacactggcagccaagtgacagttatatatgggcgaggctagctcagcgatgggaaagtctagctggagccactgtgcatttagcgggcatctgttgagcacagatgctgtggacaaaggggacaaaaacccctcccttggccgggtgcggtgcctcacacctgtaatcccagcactttgggaggctgaggcgggcagatcattggaggtcaggagttggagaccagcctgaccaacatggtgaaaccctgtctctactaaatacagaaaattagcagggcatggcagcacgcatctgtggtcccaactgcttgggaggctgaggtgggaggattgcttgagcccaggaggtccaggctgcagtgagctatgatcgcaccacggcactgcagcctgtgtaacagagcgagactcaaaaaacaagcacaaccctccctcaaggaacagcccttctcatggggtcacgtgactggagagatgctgagatgtttgcggtagatgcaggaccgcttgtccgaatcgttttcagcattcataagaaggagatagctagccaggaacagaggcagcttcctcatctggtagagaaaagtgtctgcggaaaaaagcaacagtgtgctcatggttgaaagcgtgagggtgccgctcactgccatctgttcctggaccagatgtgggagggggcgtggagatcagacattcacttttagatttgtacagaactacttcgtagagataaaattcacttaaccatacggtcagcctagttagagtatgtgattcagtggcttttagtgaccattgtgtaaccatccccgcagtcaattttagaacattttcactgtccgtaaaggaaacctcacacatgtcagccatcacccccgcaattccctgtctcgtgtggtcttgggctgccaggcttcctgtctcagggaccagcccaccctgaccaattcacatagatgaaactgtgggccgggcatggtggctcacacctgtaatcccagcactttgggaggccgaggtaggtggaccacctgaggtcaggagttcaagaccagcctgaccaacatggagaaaccccatctctactaaagttacagaattagccgggtatggtggcacatgcctgtaatagtagctactcgggaggctgaggcaggagaatcgcttgaacccaggaggcgggggttgtggtgagctgagatcacaccattgcactccagtctgggcaacaagacagaaactctatctcaaaaaaaaaatgtgaagcgtgcaggtcagactgccttcacagacgtgcagagcaggtgtgagggcgagggtttgaggtgccctctggctctgtgcagggtgggtgtgctggtagacggggtgtggggaggaaagcctgggccggggcgggatccacgggcactggatgagggacagatgggaggtaagagggtctagtctcagtgtcccaggaggggttcagggacccatcctcactcccgcccctcagaccctgctctcagcggcccacgaggtggagttgcagcggcagaaggaggcggagaagctggagcggcagctggccctgcccgccacggagcaggccgccacccaggtgagccccgcacctgcccactccctcccctccccgggcctcctacccacccctgacactgcaccccgcctccccaggagtccacattccaggagctgtgcgaggggctgctggaggagtcggatggtgagggggagccaggccagggcgaggggccggaggctggggatgccgaggtctgtcccacgcccgcccgcctggccaccacagagaagaagacggagcagcagcggcggcgggagaaggctgtgcacaggctggtgagcgcctgggccagcggggcctgcctctgatgcctcgcccccttccttccttcctcccaccatgggctgccctgggtgctgcgggcagcctgcacaccccaagccccgcatgtggcctgtggtttgggctgtttgggatcctcacagctgagactcatttcccagcctcttccaggcagggctcgggctggggtgggacagggtccctggcgcttctgtttgaggggcggggtggggggaggtttctgcaccgcagaccaggggagatggatgacaaaaggggcttcagcaaacagctgctgggaaggcactggaggggccgctgatgtgacggggttaggaagggcctccggggacaggcaggtttgtgcagggaaggctccctgtgtagagagaaggtctccctgtgtgggcagcaccggcctgagccctgaccctcccccgtctccacagcgggtacagcaggccgcgttgcgggccgcccggctccggcaccaggagctgttccggctgcgcgggatcaaggcccaggtggccctgaggctggcggagctggcgcggcggcagaggcggcggcaggcgcggcgggaggctgaggctgacaagccccgaaggctggggcggctcaagtgagaaccaggccgggggttctgggagaggctggggagggggccgggtcccaggtcctgacaccttcctgcctttgttcaggaactgcccaccccccccatcgggagaccacctcttcccccacaaaaccccacattctcagaggccccttcttctccaggagggggctttggactgggtgtcctgggccccgcgggggtgatatttctgaacacccgccctgttctgcaggtaccaggcacctgacatcgacgtgcagctgagctcggagctgacagactcgctcaggaccctgaaggtgctcactgtgtcctgccgtggagccccgtgcccagtgatgacaccatccttgctccccgtgccccccaggggctatgggcgacaccatggctgcccctgggctgggccagtggggccaatgcccaggggctgagggcacgggatgctgggatgagatcccagggtgaggggccaggctaaggtttgagtccgggaccctaagaaggcctttccttccagctggtccctgttgcagtcccggtcacctttaggactagagggaccttcctgaagctcagaaccaaccctgtccctcccctgctcggaacctgctgtggctccccagtgcccctgaggaagcccagctcctctgtcagccacacgcctgggccgacccggccgtggggctccagccagttgtgctcatgagcggactgtgccttctccctctgatccagcctttgccctcgctgtccccttttctgtgtcgtcaccagcccacttcccgtgactcctctaagcccagcttagagatggccataggttggtggctgtcatcccaacactgagccccagcagctgagggccaggctgagtccctggtgcccacaggctgccctggggggagactgcatggggctgagccctgccaggaccccgaggagaggtccaggcccttgggcttctgccaggccctgctgaggcctccctctctgtcctgtagcccgagggcaacatccttcgagaccggttcaagagcttccagaggaggaatatgatcgagcctcgagagagagccaagtaaggggcggccggggctgctgtggggcgagggcatctgggattggccccgggcactgattgctccattgtccctgctccaggttcaaacgcaagtacaaggtgaagctggtggagaagcgggcgttccgtgagatccagtgagtccacccggcttcggcgcaaggaagggagcccttctcccaccccgtggtgcccaccgagtcccagggccccttccagagtgtggctagtggctgagccacacccccttggccatgcccagaagaggccctgaaaccagagcggggttgggagggtccccaaagggaaactgaaaggcagggggtgtcaggtcggcagggggtatggggcaccctctcacccaccctcagctcctttcctctgtccccaggttgtagctgccatcagatgccggagactcgcccttcaataaaaaatctcttctagctgatcagtgggctccacgtgtggcttgtgtgcctcctgcgggcggctgctcccgggtgcagactctgcgtgtccccccgtggcgcacaagcatgtaggtgccagaactcaccgccagagcctggtgagggcctagggtgtgtctgaaggggtcatcagccgactggatcgtggtctgtccaatagctgtgaagctggcagcccttccaagcctgggcagatcctaaaaagacagcaggcagagggcgcagggcttatggcctggccggagttgggaggtgaagcagagggcacagggcttatggcctggccggaggtgggaggtgaagcagagggcgcggggcttatggcctgtctggaggtgggaggtgaagcagaggtgaggaggaggttcccccactggattccgacttggagaatagcccagttccttctgctgcgggtgacgtagcagctcttgccacactgatagaaggagtggtggcagctgacctctgccgatagaacacctgctatcgggtttaagcaggtggattcactcactgaactcacagcggcctaaccaatgagggctgtacttattcccattttaaaggtgaggaaatagggctgggcacagtggttcactcctgtaatcccatcactttgggaggctgaggcgggcagatcacttgagcccaggagtttgagaccagcctgggcaacatagccataccctatctctaccaaaaattcgccagttatggtgggatgcagctatggtcgcagctactggggaggctgaggtgggaggatcacctgagcttgggaggtggaagctgcagtgagccatgatcacgccattgcactgcagcctgggtgacagagggagacctgtaccaaaaacttaagtaacaaaggtgaggaaacagaggcacataaaatgaggtaattttcctcccttctgtgcctattttgaaaacgtttttaaaatctttacaagaaacgaaaaacttattctcactgtaaatcattgtcaaaacgtgtctgtcactgttgacctttgccctccagtcacatccacgcccctgttctggagctgcctgtcaagcagtcactgcagtgtggtttgagtgattatgctccctgtgtgattctattaaattacataatcgattagccaggcatggtggtgtgcacctgtagtcccagctcctggggaggctgaggtaggagaatcgcttgaacctgggaggtggaggctacagtgagctgagattgcgccactgcagtctctcctggatgacaaagaggaccctgtctcgacccccccaccccccaaaaaactaacgtaaatttcacgcatgtacttgtgaggatagaattggttttttttttttttggtgtcttaggatcacactgtgcgtgattctgcagcttgctgtcagtgcatcttggaggtaattctgtgtctgtacagaactgcttccttctgttttgtggctgtgtggaatcccattacgagggtgtgccttgtgtttcttaaccaggccagtgtggctcctcctaatgaaaccgaaacaatgtctttgtccacgtgcctttttacttgtgtctgtagttaagtacctggaagtgaatcttggctgaaggatacatgtgtctgtaacaggtcatttgataggttcaacccaattggtctccaaaggggctgtgctgatttttactctctggtagcataggaggagcctgcctgttgccgtgtagctttgctacggtgcgattccattatttttatttgattgtgtctggttaccagtgaggttgaacttttttttttttttgaggtagggttccccaggtgggagtgcaatggtgcaatcccagcttcttggctcactgcagccttgacctcctgggctcaagtgatcctcccacctccgtcctcccaagtagctgggattacaggcacatgccaccatgcctggctactttagtatttttattgaagatggggatttgccatgctgcccaggctggcctcaaactcctgacctcaagcgatccacccaccttggcttcccaaagtgctgggactacaggcatgagccactgtacctgtcttaaacatctccttatatgattgctgaccattcattcacattcctcttctgtgttggtacaaaccttttgaccatttttctcctgtgctgtttgtcattttcttgtttatttgtagtagctctttatttattgtggacccacagtctgtcatacacgtcgcaaacatttcccctaggctgcttttgacttttgactttgtatgtggtgtcttttgtcaggaaggaagggtgttacgttttctgttggtctttctccgttttatactatggcctttgggaaagcttctctaggacaaaatgtttataaaaatagagcaggcagtttataaaagaaatgagtgaggctgggcatggtggctcatgcctgtaatcccagcactttgggaggctgaggcgggtggatcacctgaggtcaggagttcaagaccagtctgaccaacatggagaaaccccgtctctactaaaagtactaaaaaattagccgggtgtggtggcgtgtgctggtagtcccagctacttggggggctgaggcaggagaattgtttgaacccgggaggtggaggttgcagtcagccgagatagtgccactgtactccagcctgggcgacagagtgagactccatctcaaaaaataataaaatataatataaataaataaataaataaaatagaagggagagacttacgtcagaacttcccacctccccaccacatgccacagaacaaggctttaaggagctatttctgctgttcttccccctcccatattaaataaaaaggtgtgttctgcaggtaggaaaacagctgtgtgtgtgtgtgttgggggcggcggggggtggatgtgtggacgatagagcagtagggagaggtaaaaatgaggccgggcatagtggctcacacttgtaatcccagcactttgggaggtggaggtgggtggatcacctgaggtcaggagttcgagaccagcctggccaacatggcgaaactccatctctcctaaaaaatataaaaattagctgggtatggtggcacgcacctatagtcccagctacttgggaggctgaggcaggagaatcacttgaacctgggaggcggaggttgcagtgagctgagaccgcaccactgcactccagcctgggcaacaagagtgaaactccatctcaggaaaaaaagaaaaaaaaaaacaccatctatcaaggaggccagcctctgacccagtgactctgccaggggtgactgaaggaaactgctggaaatggggaggaagctcttaatgcccggacacggcgattggagcgtcgggcacattcctggatacccaggggtgagggtggtcacagccactcaaggacaaactctgtggcctggacacttagtgtcctcaggaagtccttggtatttaattgcctgggaaaatgtgtctgtttccgtgtgtgaaatggggggtccacagcaaaggggtttgtgggtgtttgcacagaaatgacatttcacatccgaattttatgtcagaagcctaaaagtacagaattcagctgggcgcagtggctcacgcctgtaatcttgtcactttgggaggcccaggcaggaggattgcttgaggccaggaattggagaccaccctgggcaacacagcgatactccatctctagaaaaacattttttaggccggtgcagtggcacttgtaatcctagcactttaggaggttgaggtgggtggattgcttgagtccaggagttcaagaccagcctgggcaccatggcaaaatcccactggtttctacaaaagatggaaaaaattagccaggtatggtggtgtgtgccatgtagtcccagctactcaggtggctgaggtgggatgatcagctgagctttggaggttgaggttgcagggagccaaaatctactgcctttcagcctgggtgacacagtgagaccctgtctcaaaaaaaaaaaagttttaaattatttagtcatggtgttgtgctcctgtagtccttgctactcgggaggctgaggctggagcccaggaggtggaggctgcagcatagtataatgatgccactgtgctccatcctgggtgacagcgagactaaaacaaaatacagaactctggctaacaatttacaagccgaatttcactaatgtctgcagtttcctttgaaaaatgtaaaacaggcctggcgcggtggctcatgcctgtaatcccagcactttgggaggcaggcggatcacctgagggtcaggagtttgagaccagcctggccaacatggtgaaaccccatctctactaaaaatagcaaaagttagctgggtgtagtggcagggcgtctgtaatcccggctaggctacttgggaggctgaggcaggagaattacttgaaccccggaggcggaggttgcagtgagctgagatcacgccattatactccagcctgggcaacaagagtgaaactctgtctcaaaaaaagaaaaagaaaaaaaaaacgtaaaacaaggtggattaatgaacagatgccccataaaacaaaagcactgaaatgttaagggcagaatctaggtggtggggtatgggggtatgcacagaaaaattcccttgactttaactgaaagtgtcctaatagggaaatggcacattggggtttcggggccatgtaatggcacaggtttctatcatggccctgcacctgcttttgagtctgtaacttggtattatttttcctaaagcgggtcctccagattataaaagcctcaggcatcagccaggtacagtgactcacgcctgtaatcccagcattttgggaggctgaggtgggtggctcacctgaggtcaggaattcgagaccagcctggacaacatggtgaaaccccatctctactaaaaacacaaaaattacccaggcgtggtggcaggtgcctgtaatcccagctactcaggaggctgaggcaggagaatggcttgaacccaggaggcggagattgcagtgagccgagatcataccattgcactccagcctgggcaacagagtgacactccatctcaaaaacaagacaaaacaaaacaaaaagcttgtggcatgggtatgactttgctttttagaaggatggagaccagacgaatgtagtggcttgctcctgtcatcccagcccttcaggaggctgagttgggaggattgcttgaggccaggagtgagaccagcctgggcaacatagcaagaccccatctctaaaagaaaaaaaaaatgagctgggcataatggcatgtgcccatagtctcagctactcaggaggctgaggtgggaggatctcttgagtccaggagtttgaggctgcagtaaacggtgatcgtgc
